(19) United States
(12) Patent Application Publication
(10) Pub. No.: US 2005/0112134 A1
(43) Pub. Date: May 26, 2005

(54) Compositions and methods employing alternative reading frame polypeptides for the treatment of cancer and infectious disease

(75) Inventors: Thomas Graddis, Seattle, WA (US); Reiner Laus, Bellevue, WA (US); Michael Diegel, Covington, WA (US); Damir Vidovic, Bellevue, WA (US)

Correspondence Address: SPECKMAN LAW GROUP PLLC, 1501 WESTERN AVE, SEATTLE, WA, 98101, US

(73) Assignee: DENDREON CORPORATION, Seattle, WA (US)

(21) Appl. No.: 10/794,514

(22) Filed: Mar. 5, 2004

Related U.S. Application Data
(60) Provisional application No. 60/453,131, filed on Mar. 5, 2003.

(51) Int. Cl. C07H 21/04; A61K 39/00

(52) U.S. Cl. 424/185.1; 435/69.1; 435/320.1; 435/325; 530/350; 536/23.5

(57) ABSTRACT

Provided are alternative reading frame (ARF) polypeptides as well as antigen presenting cell (APC) and dendritic cell (DC) based compositions and methods that employ alternative reading frame polypeptides. ARF polypeptides and ARF polypeptide-based compositions and methods are useful in the treatment of cancer and infectious disease.

### CROSS REFERENCE TO RELATED APPLICATIONS

[0001] This application claims priority to U.S. Provisional Patent Application No. 60/453,131, filed Mar. 5, 2003.

### REFERENCE TO SEQUENCE LISTING SUBMITTED ON COMPACT DISC

[0002] This application incorporates by reference in its entirety the Sequence Listing contained in the accompanying two compact discs, one of which is a duplicate copy. Each CD contains the following file: 1003U SEQLIST.TXT, having a date of creation of 5 Mar. 2004 and constituting 748 KB.

### BACKGROUND OF THE INVENTION

[0003] 1. Technical Field of the Invention

[0004] The present invention relates, generally, to compositions and methods for the treatment of cancer and infectious disease. More specifically, this invention provides alternative reading frame (ARF) polypeptides, conjugates, and fusion proteins; polynucleotides encoding (ARF) polypeptides, conjugates, and fusion proteins; and antigen presenting cell (APC) and dendritic cell (DC) based compositions and methods that employ ARF polypeptides and polynucleotides which compositions and methods are useful in the treatment of cancer and infectious disease.

[0005] 2. Description of the Related Art

[0006] The central dogma of molecular biology provides that genomic DNA is transcribed into mRNA and mRNA is translated into protein. According to recent estimates, the human genome encodes approximately 30,000 to 100,000 mRNAs that are translated into proteins that, in total, comprise the proteome. Harrison et al., Nucl. Acids Res. 30:1083-1090 (2002).

[0007] The mechanism by which eukaryotic mRNA is translated into protein is well established. Through the process of ribosome-scanning, a 43S pre-initiation ribosomal complex assembles on the 5′ mRNA CAP and migrates in a 5′ to 3′ direction along the 5′ untranslated region (UTR) in an ATP-dependent process. When the 43S complex encounters an initiator AUG codon within the proper context (normally the first AUG 50 to 100 nucleotides downstream of the CAP), it pauses for a time sufficient to permit the association of the 60S ribosomal subunit to create the ribosomal initiation complex that commences translation in the normal, rf0, open reading frame. See, Kozak, J. Cell Biol. 108:229-241 (1989); for a review, see also, Gray et al., Annu. Rev. Cell Dev. Biol. 14:399-458 (1998).

[0008] The ribosomal machinery of a eukaryotic cell can produce errors in translating mRNA that result in aberrant translation products such as alternative reading frame (ARF) polypeptides. ARF polypeptides are translational products encoded in reading frames rf1 and rf2 that are shifted by one or two nucleotides, respectively, from the normal rf0 reading frame. Because their expression is low, ARF polypeptides are biologically invisible to the cell; however, due to the exquisite sensitivity of the cytotoxic T-cell (CTL) response, ARF polypeptides may be immunogenic at very low copy numbers.

[0009] ARF polypeptides are produced entropically due to errors inherent in protein synthesis. Yewdell et al., J. Immunol. 157:1823-1826 (1996). Mechanisms by which translational errors produce ARF polypeptides include: (1) initiation of translation in the 5′ UTR (Uenaka et al., J. Exp. Med. 180:1599-1607 (1994)); (2) frame-shifting of the initiation complex at the normal rf0 AUG codon one base (rf1) or two bases (rf2) forward or one base (rf2) or two bases (rf1) backward; (3) scan-through the normal rf0 AUG codon and formation of an initiation complex at a downstream codon (Bullock et al., J. Exp. Med. 186:1051-1058 (1997)); (4) formation of an initiation complex at an internal ribosome entry site (IRES) located 3′ to the site of normal cap-dependent ribosomal entry (Nanbru et al., J. Biol. Chem. 272:32061-32066 (1997); (5) frame shifting of the ribosome through random and programmed frameshifts from rf0 to rf1 or rf2 reading frames (Elliott et al., Eur. J. Immunol. 26:1175-1179 (1996); Rom et al., Proc. Natl. Acad. Sci. 91:3959-3963 (1994); Farabaugh, Annu. Rev. Genet 30:507-528 (1996)); (6) formation of initiation complexes at rf1 or rf2 codons other than AUG, such as, for example, ACG or CTG (Shastri et al., J. Biol. Chem. 270:1088-1091 (1995); Malarkannan et al., Immunity 10:681-690 (1999); and Ronsin et al., J. Immunol. 163:483-490 (1999)); (7) ribosomal skipping of mRNA segments (Herr et al., Annu. Rev. Biochem. 69:343-372 (2000)); (8) ribosomal suppression of termination codons and subsequent translational readthrough (Bullock et al., J. Exp. Med. 186:1051-1058 (1997)); and (9) synthesis of ARF polypeptides in reading frames 3, 4, and 5 (i.e. rf3, rf4, and rf5) resulting from the translation of antisense strands of genes that are expressed through transcription from cryptic promoters (Van den Eynde et al., J. Exp. Med. 190:1793-1799 (1999)).

[0010] Upon translation, ARF polypeptides are likely to act as substrates for the ATP-dependent TAP transporters, to be translocated into the lumen of the ER, and to be loaded onto major histocompatibility complex (MHC) class I molecules bound for the cell surface of the antigen presenting cell (APC). The ARF polypeptide is presented within the context of an MHC class I molecule to naïve CD8⁺ cytotoxic T-cells (CTL). This stimulates the clonal expansion of ARF-specific CTL capable of identifying and eliminating cells expressing the ARF polypeptide. For a review, see, Rock et al., Annu. Rev. Immunol. 17:739-779 (1999).

[0011] The 5′ UTR of many human genes helps to regulate translational initiation of the structural gene. Alternative 5′ UTR initiation codons is one mechanism by which translation initiation is regulated. The 5′ UTR of human genes is a likely rich source of Arf peptides due to this regulatory mechanism. For example, JunD mRNA, which translates in a c ap-dependent manner, initiates at two in-frame AUGs, yielding a 39 and 34 kDa protein. JunD mRNA encodes an out-of-frame AUG that directs translation of a short Arf peptide as well as three non-AUG codons also able to support translational initiation, in frame ACG and CUG codons down stream of the rf0 AUG, and an out-of-frame CUG found in the 5′ UTR that should generate an Arf peptide. Short et al., J. Biol. Chem. 277:32697-705 (2002). These codons function to cumulatively suppress 34 kDa translation. The 5′ UTR of eIF4GI mRNA contains an out-of-frame AUG that acts to regulate expression of eIF4GI and produce an Arf peptide. Byrd et. al., Mol. Cell. Biol. 22:4499-511 (2002).

[0012] Other mechanisms can account for Arf production in human genes. For example, C- and L-Myc (Joplin et. al., RNA 10:287-98 (2004) and Cencig et. al., Oncogene 23:267-77 (2004)) angiotensin II type 1 receptor (Martin et. al., Mol. Cell. Endocrinol. 30:51-61 (2003)); and HSP70 (Rubtsova et. al., (2003)) initiate translation via 5′-UTR IRES sequences in a cap-independent manner. Alternative splicing in the 5′ UTR will also give rise to novel peptides.

[0013] Tumor infiltrating lymphocyte (TIL)-derived ARF-specific CD8⁺ CTLs have been identified in melanoma and renal cell carcinoma patients. Wang et al. J. Exp. Med. 183:1131-1140 (1996); Moreau-Aubry et al. J. Exp. Med. 191:1617-1623 (2000); Rosin et al. J. Immunol. 163:483-490 (1999); and Probst-Kepper et al. J. Exp. Med. 193:1189-1198 (2001). Only a small number of tumor antigens have been identified by TIL-derived CTLs; however, a substantial number of those identified arise from ARF polypeptides. Rosenberg, Immunology Today 18:175-182 (1997). For example, an ARF polypeptide has been identified using a lymphocyte clone from a patient exhibiting complete regression of melanoma metastases. Rosenberg et al. J. Immunol. 168a:2402-2407 (2002).

[0014] While the existence of alternative reading frame polypeptides has been described, it has not been appreciated that ARF polypeptides may be employed in compositions and methods for stimulating a protective immune response specific for cancer and/or infectious disease antigens.

### SUMMARY OF THE INVENTION

[0015] The present invention addresses these and other related needs by providing alternative reading frame (ARF) polypeptides, conjugates, and fusion proteins and polynucleotides encoding (ARF) polypeptides and fusion proteins. Also provided are DNA- and RNA-based vector systems as well as APC/DC-based systems for the in vivo delivery of ARF polynucleotides and polypeptides, respectively. Thus, for example, the present invention provides compositions comprising antigen presenting cells APCs or DCs that are primed ex vivo with one or more of the ARF polypeptides, conjugates, and/or fusion proteins and/or one or more polynucleotide encoding one or more ARF polypeptide and/or fusion protein of the present invention. Still further provided are methods for identifying and preparing ARF polypeptides, conjugates, and fusion proteins, as well as the corresponding in vivo delivery systems, that are effective in eliciting an immune response against cancer cells and organisms that cause infectious disease which cancer cells or organisms express an antigen from which the ARF polypeptide is derived.

[0016] ARF polypeptides, conjugates, and fusion proteins and APCs primed with ARF polypeptides, conjugates, and fusion proteins may be employed in methods for eliciting immune responses, including, but not limited to, CD8⁺ cytotoxic T-cell responses, against and for treating disease associated with cells and/or organisms that express the ARF polypeptide and in methods for treating disease associated with the expression of an antigen from which the ARF polypeptide is derived.

[0017] Thus, within certain embodiments, the present invention provides ARF polypeptides wherein the ARF polypeptides are expressed in a cancer cell at a level higher than they are expressed in normal cells of the same tissue type. Within preferred embodiments, the ARF is expressed in a cancer cell in a patient afflicted with a cancer such as, for example, a soft tissue sarcoma, a lymphoma, and/or a cancer of the brain, esophagus, uterus, cervix, bone, lung, endometrium, bladder, breast, larynx, colon/rectum, stomach, ovary, pancreas, adrenal gland and prostate. ARF polypeptides may be expressed in other cancer cells as well.

[0018] Within other embodiments are provided ARF polypeptides wherein the ARF polypeptides are encoded by an mRNA that is expressed by an organism that is the causative agent of an infectious disease. Exemplary infectious disease organisms include, but are not limited to, viruses such as human immunodeficiency virus (HIV), a herpes virus, and an influenza virus; parasites such as Leishmania; and bacteria such as Mycobacteria, Chlamydia, and Ehrlichia.

[0019] According to these embodiments, ARF polypeptides include polypeptides that result from ribosomal shifting at the initiation codon and polypeptides that result from initiation of mRNA at AUG codons, other than the normal AUG codon, in the rf1 and/or rf2 reading frames.

[0020] Within still further embodiments, the present invention provides isolated alternative reading frame (ARF) polypeptides comprising at least 9 amino acids wherein the ARF polypeptides are capable of eliciting an immune response and wherein the ARF polypeptides correspond to polypeptides generated by an in vivo translational error including, but not limited to: (a) synthesis of polypeptides in reading frames rf1 and rf2 generated through AUG translation initiation of open reading frames in 5′ and 3′ untranslated regions (UTRs); (b) frame-shifting of the initiation complex at the normal rf0 AUG codon one base (rf1) or two bases (rf2) forward or one base (rf2) or two bases (rf1) backward; (c) formation of an initiation complex at an AUG codon that is downstream (i.e. 3′ to) the normal initiation AUG codon; (d) formation of an initiation complex at an internal ribosome entry site (IRES) located 3′ to the site of normal cap-dependent ribosomal entry; (e) frame shifting of the ribosome through random and programmed frame-shifts from rf0 to rf1 or rf2 reading frames; (f) formation of initiation complexes at rf1 or rf2 codons other than AUG, such as, for example, ACG or CTG; (g) ribosomal skipping of mRNA segments; (h) ribosomal suppression of termination codons and subsequent translational readthrough; (i) synthesis of polypeptides in reading frames rf0, rf1, and rf2 generated through AUG translation initiation of open reading frames (ORFs) in junk DNA; (j) synthesis of polypeptides in reading frames 3, 4, and 5 (i.e. rf3, rf4, and rf5) resulting from the translation of antisense strands of genes that are expressed through transcription from cryptic promoters; and (k) alternative mRNA splice variants wherein an intron encoded polypeptide reads into exon reading frames rf1 or rf2 of a normal gene product.

[0021] The immune response elicited by ARF polypeptides of the present invention is most commonly, but not necessarily, a CD8⁺ cytotoxic T-cell (CTL) response.

[0022] Exemplary preferred ARF polypeptides may be derived from polynucleotides encoding human tyrosine kinase receptor (hHER-2; SEQ ID NO: 2; Genbank Accession No. M11730); human telomerase reverse transcriptase (hTERT; SEQ ID NO: 4; Genbank Accession No. NM_{—}003219); mouse telomerase reverse transcriptase (mTERT; SEQ ID NO: 6); Genbank Accession No. NM_{—}009354); human transient receptor potential cation channel 8 (hTrpP8; SEQ ID NO: 8; Genbank Accession No. NM 024080); one or more human prostatic acid phosphatase variant (hPAP; SEQ ID NOs: 10 and 12; Genbank Accession Nos. M34840 and X53605, respectively); human carbonic anhydrase IX (hCA9; SEQ ID NO: 295; Genbank Accession No. NM_{—}001216); human carcinoembryonic antigen (hCEA; SEQ ID NO: 302; Genbank Accession No. M17303); human prostate-specific membrane antigen (hPSMA; SEQ ID NO: 345; Genbank Accession No. NM_{—}004467); human prostate-specific antigen (hPSA); SEQ ID NO: 369; Genbank Accession No. M26663); human p53 cellular tumor antigen (hp53; SEQ ID NO: 381; Genbank Accession No. M14695); human P-glycoprotein (hPGY1; SEQ ID NO: 392; Genbank Accession No. M14758); human alpha-fetoprotein (hAFP; SEQ ID NO: 424; Genbank Accession No. NM_{—}001134); human mucin precursor (hMUC1; SEQ ID NO: 441; Genbank Accession No. AF125525); human preferentially expressed antigen of melanoma (hPRAME; SEQ ID NO: 452; Genbank Accession No. U65011); human ephrin receptor (hEPHA3; SEQ ID NO: 468; Genbank Accession No. AF213459); human peptidyl-prolyl isomerase and essential mitotic regulator (hPIN1; SEQ ID NO: 496; Genbank Accession No. U49070); human BASE (hBASE; SEQ ID NO: 504; Genbank Accession No. AY180924); human prostate stem cell antigen (hPSCA; SEQ ID NO: 515; Genbank Accession No. AF043498); human SURVIVIN (hSURVIVIN; SEQ ID NO: 549; Genbank Accession No. AF077350); human WTI (hWTI; SEQ ID NO: 557; Genbank Accession No. NM_{—}000378); human SGA-M1 (hSGA-M1; SEQ ID NO: 566; Genbank Accession No. AY192728); human RCAS1 (hRCAS1; SEQ ID NO: 579; Genbank Accession No. AF006265); and human CYP1B1 (hCYP1B1; SEQ ID NO: 592; Genbank Accession No. NM_{—}000104).

[0023] Within still further embodiments, the present invention provides alternative reading frame (ARF) polypeptides based upon the 5′ untranslated region (UTR) of the tumor associated antigens (TAA) presented herein.

[0024] The present invention identifies as particularly useful in this capacity (1) tissue-specific tumor antigens, (2) oncogene product peptide antigens, and (3) viral polypeptide antigens. In the context of the present invention, “tissue-specific tumor antigens” refers to antigens that are common to specific tumor types. By way of contrast, antigens that are specific to a particular individual tumor, such as the B cell lymphoma tumor-associated idiotype antigen, are distinguishable from tissue-specific tumor antigens in that they have a characteristic epitope that varies from individual to individual. Such antigens are less useful in the context of the present invention because immunostimulatory reagents must be tailored to the individual tumor.

[0025] Other antigens usefully employed in various aspects of the present invention are those proteins that are expressed on malignant tumors such as those protein antigens that can serve as target antigens for an immune attack. Exemplary such molecules include, but are not limited to, tissue-specific antigens such as MART-1, tyrosinase and GP 100 in melanoma and prostatic acid phosphatase (PAP) and prostate-specific antigen (PSA) in prostate cancer. Other target molecules belong to the group of transformation-related molecules such as the oncogene HER-2/Neu/ErbB-2. Yet another group of target antigens are onco-fetal antigens such as carcinoembryonic antigen (CEA). In B-cell lymphoma the tumor-specific idiotype immunoglobulin constitutes a truly tumor-specific immunoglobulin antigen that is unique to the individual tumor. B-cell differentiation antigens such as CD19, CD20 and CD37 are other candidates for target antigens in B-cell lymphoma. Some of these antigens (CEA, HER-2, CD19, and CD20) have been used as targets for passive immunotherapy with monoclonal antibodies with limited success.

[0026] Thus, exemplary tissue-specific tumor antigens include, but are not limited to, peptidyl-prolyl isomerase (associated with a variety of cancers, Wulf et al., J. Biol. Chem. 277:47967 (2002), breast cancer and salivary gland expression (associated with breast cancer, Egland et al., Proc. Natl. Acad. Sci. U.S.A. 100:1099 (2003), prostatic acid phosphatase (PAP; associated with prostatic tumors), Melan-A/MART-1 (associated with melanoma; Coulie et al., J. Exp. Med. 180:35 (1994); Hawakami et al., Proc. Natl. Acad. Sci. U.S.A. 91:3515 (1994), Bakker et al., J. Exp. Med. 179:1005 (1994), tyrosinase/albino (associated with melanoma), Kawakami et al., J. Exp. Med. 180(1):347-52 (1994), and CD19, CD20 and CD37 (associated with lymphoma).

[0027] Within further embodiments are provided ARF polypeptides derived from oncogene product peptide antigens that are common to specific tumor types. These ARF polypeptides will find use in the polypeptide fusion proteins and/or complexes of the present invention, for example, as reagents useful in stimulating T-cell responses specific for tumor cells expressing such ARF polypeptide antigens. Oncogenes suitable for use in the compositions and methods of the present invention include, but are not limited to, HER-2/neu (Beckmann et al., Eur. J. Cancer 28:322 (1992)) associated with human breast and gynecological cancers, and carcinoembryonic antigen (CEA) (Gold et al., J. Exp. Med. 122:467-481 (1965)) associated with cancer of the pancreas.

[0028] Still further aspects of the present invention employ ARF polypeptides derived from tumor markers that are available in the art including, but not limited to, the tissue-specific antigens such as the cytokeratins (Moll et al., Clin Immunol Immunopathol. 25(3):417-23 (1982)); prostate-specific antigen (Henttu et al., Biochem. Biophys. Res. Commun. 160:903-910 (1989)); gp75/brown (Brichard et al. J. Exp. Med. 178:489 (1993)) associated with melanoma; m elanotransferrin (Real et al., J. Exp. Med. 160:1219 (1994)); MUC1 (Barnd, Proc. Natl. Acad. Sci. U.S.A. 86:7159 (1989) and Vijayasaradhi et al., J. Exp. Med. 171:1375 (1990)) associated with pancrease and breast cancer; oncogene/tumor suppressor genes that include EGF-R (Osborne et al., Cancer Res. 40(7):2361-6 (1980)), estrogen receptor (Gorski et al., Arch. Biochem. Biophys. 113(1):100-6. (1966)), progesterone receptor (Misrahi et al., Biochem. Biophys. Res. Commun. 143:740-748 (1987)), retinoblastoma gene product (Shew et al., Proc. Natl. Acad. Sci. 87:6-10 (1990)), myc (Dalla-Favera et al., Proc. Natl. Acad. Sci. U.S.A. 79(24):7824-7 (1982), ras (Parada et al., Nature 297(5866):474-8 (1982)), p53, (Schlichtholz, Cancer Res. 52:6380 (1992); MAGE-1,3 (van der Bruggen et al., Science 254:1643 (1991) and Gaugler et al., J. Exp. Med. 179:921 (1994); and viral antigens including human papilloma virus (HPV), HIV-gp 120, gp41, GAG, RT, NEF, VIF, Influenza HA, and EBV.

[0029] Alternative embodiments of the present invention provide compositions and methods that employ ARF polypeptides derived from viral antigens. Such antigens include, but are not limited to, the HIV antigens gp120, gp41, gag, RT, NEF, VIF; the influenza antigens HA, core and matrix; and the EBV antigens EBNA, BFLF1, BOLF1, BGLF2, LMP2a, LMP2b, BBRF1, BBRF2, and P11L27.

[0030] Within certain embodiments, ARF polypeptides are at least 9 amino acids in length. Other embodiments provide ARF polypeptides that are at least 10, 11, 12, 13, 14, or 15 amino acids in length. Still other embodiments provide ARF polypeptides that are at least 16, 17, 18, 19, or 20 amino acids in length. Further embodiments provide ARF polypeptides that are at least 25, 30, 35, 40, 45, or 50 amino acids in length or that are at least 75, 100, 150, or 200 amino acids in length.

[0031] ARF polypeptides derived from a polynucleotide encoding hHER-2, SEQ ID NO: 2, are presented herein as SEQ ID NOs: 15-32. ARF polypeptides derived from a polynucleotide encoding hTERT, SEQ ID NO: 4, are presented herein as SEQ ID NOs: 195-202. ARF polypeptides derived from a polynucleotide encoding mTERT, SEQ ID NO: 6, are presented herein as SEQ ID NOs: 96-111. ARF polypeptides derived from a polynucleotide encoding hTrpP8, SEQ ID NO: 8, are presented herein as SEQ ID NOs: 203-219. ARF polypeptides derived from a polynucleotide encoding a hPAP variant, SEQ ID NO: 10, are presented herein as SEQ ID NOs: 248-256 and from a polynucleotide encoding an alternative hPAP variant, SEQ ID NO: 12, are presented herein as SEQ ID NOs: 280-289. ARF polypeptides derived from a polynucleotide encoding hCA9, SEQ ID NO: 295, are presented herein as SEQ ID NOs: 296-300. ARF polypeptides derived from a polynucleotide encoding hCEA, SEQ ID NO: 302, are presented herein as SEQ ID NOs: 303-319. ARF polypeptides derived from a polynucleotide encoding hPSMA, SEQ ID NO: 345, are presented herein as SEQ ID NOs: 350-367. ARF polypeptides derived from a polynucleotide encoding hPSA, SEQ ID NO: 369, are presented herein as SEQ ID NOs: 374-379. ARF polypeptides derived from a polynucleotide encoding hp53, SEQ ID NO: 381, are presented herein as SEQ ID NOs: 386-390. ARF polypeptides derived from a polynucleotide encoding hPGY1, SEQ ID NO: 392, are presented herein as SEQ ID NOs: 397-422. ARF polypeptides derived from a polynucleotide encoding hAFP, SEQ ID NO: 424, are presented herein as SEQ ID NOs: 429-439. ARF polypeptides derived from a polynucleotide encoding hMUC1, SEQ ID NO: 441, are presented herein as SEQ ID NOs: 446-450. ARF polypeptides derived from a polynucleotide encoding hPRAME, SEQ ID NO: 452, are presented herein as SEQ ID NOs: 457-466. ARF polypeptides derived from a polynucleotide encoding hEPHA3, SEQ ID NO: 468, are presented herein as SEQ ID NOs: 473-494. ARF polypeptides derived from a polynucleotide encoding hPIN1, SEQ ID NO: 496, a represented herein as SEQ ID NOs: 501-502. ARF polypeptides derived from a polynucleotide encoding hBASE, SEQ ID NO: 504, are presented herein as SEQ ID NOs: 509-513. ARF polypeptides derived from a polynucleotide encoding hPSCA, SEQ ID NO: 515, are presented herein as SEQ ID NOs: 520-521. ARF polypeptides derived from a polynucleotide encoding hSURVIVIN, SEQ ID NO: 549, are presented herein as SEQ ID NOs: 551-553 and 555. ARF polypeptides derived from a polynucleotide encoding hWTI, SEQ ID NO: 557, are presented herein as SEQ ID NOs: 559-562 and 564. ARF polypeptides derived from a polynucleotide encoding hSGA-M1, SEQ ID NO: 566, are presented herein as SEQ ID NOs: 568-575 and 577. ARF polypeptides derived from a polynucleotide encoding hRCAS1, SEQ ID NO: 579, are presented herein as SEQ ID NOs: 581-588 and 590. ARF polypeptides derived from a polynucleotide encoding hCYP1B1, SEQ ID NO: 592, are presented herein as SEQ ID NOs: 594-599.

[0032] Equally preferred are functional fragments, derivatives and variants of any of the ARF polypeptides presented in SEQ ID NOs: 15-32, 96-111, 195-202, 213-219, 248-256, 280-289, 296-300, 303-319, 350-367, 374-379, 386-390, 397-422, 429-439, 446-450, 457-466, 473-494, 501-502, 509-513, 520-521, 551-553 and 555, 559-562 and 564, 568-575 and 577, 581-588 and 590, and 594-599. Functional variants of any of these ARF polypeptides preferably exhibit at least about 70%, more preferably at least about 80% or 90% and most preferably at least about 95% or 98% sequence identity to the ARF polypeptides presented in SEQ ID NOs: 15-32, 96-111, 195-202, 213-219, 248-256, 280-289, 296-300, 303-319, 350-367, 374-379, 386-390, 397-422, 429-439, 446-450, 457-466, 473-494, 501-502, 509-513, 520-521, 551-553 and 555, 559-562 and 564, 568-575 and 577, 581-588 and 590, and 594—599.

[0033] Exemplary preferred functional fragments include the ARF polypeptide fragments of hHER-2, SEQ ID NOs: 15-32, presented herein as SEQ ID NOs: 33-95; the ARF polypeptide fragments of mTERT, SEQ ID NOs: 96-111, presented herein as SEQ ID NOs: 112-194; the ARF polypeptide fragments of hTrpP8, SEQ ID NOs: 203-219, presented herein as SEQ ID NOs: 220-247; and the ARF polypeptide fragments of a hPAP variant, SEQ ID NOs: 248-256, presented herein as SEQ ID NOs: 257-279.

[0034] Within other aspects, the present invention also provides polypeptides and functional fragments, derivatives, and variants thereof as well as polynucleotides encoding polypeptides and functional fragments, derivatives, and variants thereof wherein the polypeptides are derived from an amino acid sequence of the full-length sequence of hCA9 rf1 and rf2, hCEA rf1 and rf2, hHER2 rf1 and rf2, hPAP rf1 and rf2, hTERT rf1 and rf2, hTrpP8 rf1 and rf2, hPSMA rf1 and rf2, hPSA rf1 and rf2, hp53 rf1 and rf2, hPGY1 rf1 and rf2, hAFP rf1 and rf2, hMUC1 rf1 and rf2, hPRAME rf1 and rf2, hEPHA3 rf1 and rf2, hPIN1 rf1 and rf2, hBASE rf1 and rf2, hPSCA rf1 and rf2, hSURVIVIN rf1 and rf2, hWTI rf1 and rf2, hSGA-M1 rf1 and rf2, hRCAS1 rf1 and rf2, and hCYP1B1 rf1 and rf2. Within these embodiments, the full-length amino acid sequences are derived by deleting stop codons (TGA, TAA, and TAG) and by deleting residues between stop codons that encode less than 9 consecutive residues.

[0035] Exemplary hCA9 rf1 and rf2, hCEA rf1 and rf2, hHER2 rf1 and rf2, hPAP rf1 and rf2, hTERT rf1 and rf2, hTrpP8 rf1 and rf2, hPSMA rf1 and rf2, hPSA rf1 and rf2, hp53 rf1 and rf2, hPGY1 rf1 and rf2, hAFP rf1 and rf2, hMUC1 rf1 and rf2, hPRAME rf1 and rf2, hEPHA3 rf1 and rf2, hPIN1 rf1 and rf2, hBASE rf1 and rf2, hPSCA rf1 and rf2, hSURVIVIN rf1 and rf2, hWTI rf1 and rf2, hSGA-M1 rf1 and rf2, hRCAS1 rf1 and rf2, and hCYP1B1 rf1 and rf2 polypeptides are presented herein as SEQ ID NOs: 320, 322, 324, 326, 328, 330, 332, 334, 336, 338, 340, 342, 346, 348, 370, 372, 382, 384, 393, 395, 425, 427, 442, 444, 453, 455, 469, 471, 497, 499, 505, 507, 516, 518, 554, 556, 562, 564, 575, 577, 588, 590, 599, and 601, respectively and are encoded by the polynucleotides of SEQ ID NOs: 321, 323, 325, 327, 329, 331, 333, 335, 337, 339, 341, 343, 347, 349, 371, 373, 383, 385, 394, 396, 426, 428, 443, 445, 454, 456, 470, 472, 498, 500, 506, 508, 517, 519, 555, 557, 563, 565, 576, 578, 589, 591, 600, and 602 respectively.

[0036] Exemplary rf0, rf1, and rf2 5′ UTR ARFs for hAFP, hBASE, hCA9, hCEA, hCYP1B1, hEphA3, hHER2, hMDR1, hHER2, hP53, hPRAME, hPSMA, hRCAS1, hSGA-1M, hTERT, hTRP-P8, and hWTI are presented in Table 29 and the corresponding SEQ ID NOs listed therein.

[0037] Further aspects of the present invention provide fusion proteins comprising two or more ARF polypeptides as detailed above. Within certain embodiments, fusion proteins comprise two or more ARF polypeptides each comprising at least 9 amino acids. By other embodiments, fusion proteins comprise two or more ARF polypeptides that are each at least 10, 11, 12, 13, 14, or 15 amino acids in length. Still further embodiments provide fusion proteins that comprise two or more ARF polypeptides that are each at least 16, 17, 18, 19, or 20 amino acids in length. Other embodiments provide fusion proteins comprising two or more ARF polypeptides that are each at least 25, 30, 35, 40, 45, or 50 amino acids in length or that are each at least 75, 100, 150, or 200 amino acids in length.

[0038] Other aspects of the present invention provide polypeptide conjugates comprising one or more ARF polypeptide or fusion protein in combination with a polypeptide moiety that facilitates the binding of the ARF polypeptide or fusion protein to an antigen presenting cell (APC) or to a dendritic cell (DC). Polypeptide conjugates generally comprise an N-terminal moiety and a C-terminal moiety wherein the N-terminal moiety comprises an ARF polypeptide or fusion protein of at least 9 amino acids in length and wherein the C-terminal moiety comprises at least a portion of an antigen presenting cell binding protein or a dendritic cell binding protein.

[0039] Equally suited are ARF polypeptide conjugates wherein the C-terminal moiety comprises an ARF polypeptide or fusion protein of at least 9 amino acids in length and wherein the N-terminal moiety comprises at least a portion of an antigen presenting cell (APC) binding protein or a dendritic cell (DC) binding protein.

[0040] Within certain embodiments, ARF polypeptide conjugates comprise one or more ARF polypeptides, or functional fragments thereof, that are each at least 10, 11, 12, 13, 14, or 15 amino acids in length. Other embodiments provide ARF polypeptide conjugates that comprise one or more ARF polypeptides, or functional fragments thereof, that are each at least 16, 17, 18, 19, or 20 amino acids in length. Still further embodiments provide ARF polypeptide conjugates comprising one or more ARF polypeptides, or functional fragments thereof, that are each at least 25, 30, 35, 40, 45, or 50 amino acids in length or that are each at least 75, 100, 150, or 200 amino acids in length.

[0041] Also provided are functional fragments, derivatives and variants of any of the fusion proteins or conjugates comprising one or more ARF polypeptides, and functional fragments thereof, presented in SEQ ID NOs: 15-289, 296-300, 303-319, 350-367, 374-379, 386-390, 397-422, 429-439, 446-450, 457-466, 473-494, 501-502, 509-513, 520-521, 551-553 and 555, 559-562 and 564, 568-575 and 577, 581-588 and 590, and 594-599. Functional variants of any of these fusion proteins or conjugates preferably exhibit at least about 70%, more preferably at least about 80% or 90% and most preferably at least about 95% or 98% sequence identity to the ARF polypeptides presented, or functional fragments thereof, in SEQ ID NOs: 15-289, 296-300, 303-319, 350-367, 374-379, 386-390, 397-422, 429-439, 446-450, 457-466, 473-494, 501-502, 509-513, 520-521, 551-553 and 555, 559-562 and 564, 568-575 and 577, 581-588 and 590, and 594-599.

[0042] Exemplary antigen presenting cell and dendritic cell binding proteins suitable for the fusion proteins and conjugates of the present invention include GM-CSF, IL-1, TNF, IL-4, CD40L, CTLA4, CD28, and FLT-3 ligand.

[0043] Within certain embodiments, the present invention provides immunogenic compositions comprising an antigen presenting cell (APC) that has been primed by ex vivo priming with one or more ARF polypeptide, conjugate and/or fusion protein. APCs primed according to the present invention are effective in activating cytotoxic T-cells to produce a cellular response against the ARF polypeptide, conjugate and/or fusion protein. Specific preferred embodiments provide that the APCs are dendritic cells (DCs).

[0044] The present invention is also directed to methods for identifying alternative reading frame (ARF) polypeptides capable of stimulating an immune response, the methods comprising the steps of: (1) selecting an antigen of interest wherein the antigen is encoded by a polynucleotide; (2) identifying, based upon the nucleotide sequence of the polynucleotide, an rf1 and/or rf2 alternative reading frame encoding an alternative reading frame polypeptide; (3) synthesizing or expressing a polypeptide encoded by the rf1 and/or rf2 alternative reading frames; (4) priming a sample comprising an antigen presenting cell (APC) with the synthesized polypeptide; (5) contacting the primed APC with a sample comprising a population of naïve cytotoxic T-cells (CTLs) to produce a population of activated CTLs; and (6) contacting the population of CTLs with a cell expressing the antigen of interest, wherein lysis of the antigen expressing cell by the activated CTLs indicates that the ARF polypeptide is capable of stimulating an immune response. Specific preferred embodiments provide that the APCs are dendritic cells (DCs).

[0045] Other related aspects of the present invention provide methods for eliciting an immune response in a patient, the methods comprising the steps of: (1) obtaining a sample containing antigen presenting cells (APCs); (2) isolating from the sample the APCs; (3) priming the APCs ex vivo with an ARF polypeptide, conjugate and/or fusion protein wherein the stimulated APCs are capable of stimulating an immune response in vivo; and (4) administering the primed APCs to the patient. Within preferred embodiments, the immune response is a cytotoxic T-cell response. The cytotoxic T-cell response may be directed specifically against a tumor cell expressing an antigen. Specific preferred embodiments provide that the APCs are dendritic cells (DCs).

[0046] Related aspects provide methods for inhibiting proliferation of a tumor cell in a cancer patient the methods comprising the steps of: (1) obtaining from the cancer patient a sample containing antigen presenting cells (APCs); (2) isolating the APCs from the sample; (3) primeing the APCs ex vivo with one or more ARF polypeptide, conjugate and/or fusion protein wherein the primed APCs are capable of stimulating an immune response in vivo; and (4) administering the primed APCs to the cancer patient. Within preferred embodiments, the immune response is a cytotoxic T-cell response wherein the cytotoxic T-cell response is directed specifically against a tumor cell expressing an antigen. Specific preferred embodiments provide that the APCs are dendritic cells (DCs).

[0047] Within preferred methods, the tumor cell is present in a patient afflicted with a cancer such as, for example, a soft tissue sarcoma, a lymphoma, and/or a cancer of the brain, esophagus, uterus, cervix, bone, lung, endometrium, bladder, breast, larynx, colon/rectum, stomach, ovary, pancreas, adrenal gland and prostate. Tumor cells present in patients afflicted with other cancers as well.

[0048] Still further aspects of the present invention provide methods for eliciting an immune response in a patient, the methods comprising the steps of: (a) obtaining from the patient a sample containing antigen presenting cells (APCs); (b) isolating the APCs from said the sample; (c) priming the isolated APCs ex vivo with a vector comprising a polynucleotide encoding an ARF polypeptide and/or fusion protein wherein the primed APCs are capable of stimulating an immune response in vivo; and (d) administering the primed APCs to the patient. By these methods, the vector may be selected from the group consisting of an adenoviral vector, a retroviral vector, and an adeno-associated viral vector.

[0049] Related aspects of the present invention provide methods for eliciting an immune response in a patient, the methods comprising the step of administering to the patient an ARF polypeptide, conjugate, and/or fusion protein wherein the ARF polypeptide, conjugate, and/or fusion protein is capable of stimulating an immune response in vivo.

[0050] Alternative methods for eliciting an immune response in a patient comprise the step of administering to the patient a vector comprising a polynucleotide encoding an ARF polypeptide and/or fusion protein wherein the ARF polypeptide and/or fusion protein is capable of stimulating an immune response in vivo.

[0051] The above-mentioned and additional features of the present invention and the manner of obtaining them will become apparent, and the invention will be best understood by reference to the following more detailed description, read in conjunction with the accompanying drawings. All references disclosed herein are hereby incorporated by reference in their entirety as if each was incorporated individually.

### BRIEF DESCRIPTION OF THE DRAWINGS AND SEQUENCE IDENTIFIERS

[0052] FIGS. 1A and 1B are graphs depicting the survival of C57BL/6 mice pre-immunized with the indicated ARF polypeptide-pulsed dendritic cells (DC) followed by challenge with hHER-2/EL4 (E.HER2) tumor cells. The graph presented in FIG. 1A depicts the results of an experiment employing 10 mice per group and the graph presented in FIG. 1B depicts the results of an experiment employing 5 mice per group.

[0053] FIGS. 2A and 2B are graphs depicting the survival of C57BL/6 mice pre-immunized with the indicated ARF polypeptide-pulsed dendritic cells (DC) followed by challenge with either hHER-2/B16 (B16.HER2) or mPAP/B16 (B16.mPAP) tumor cells. The graph presented in FIG. 2A depicts the results of an experiment employing 5 mice per group and the graph presented in FIG. 2B depicts the results of an experiment employing 10 mice per group.

[0054] FIG. 3 is a graph depicting the survival of C57BL/6 mice pre-immunized with the indicated ARF polypeptide-pulsed dendritic cells (DC) followed by challenge with the hHER-2/EL4 (E.HER2) tumor cells. The graph depicts the results of an experiment employing 9-10 mice per group as indicated in the figure legend.

[0055] FIGS. 4A and 4B are graphs depicting the survival of C57BL/6 mice pre-immunized with the indicated ARF polypeptide-pulsed dendritic cells (DC) followed by challenge with hHER-2/EL4 (E.HER2) tumor cells. The graph presented in FIG. 4A depicts the results of an experiment employing 10 mice per group and the graph presented in FIG. 4B depicts the results of an experiment employing 5-10 mice per group as indicated in the figure legend.

[0056] FIG. 5 is a graph depicting the survival of C57BL/6 mice pre-immunized with the indicated ARF polypeptide-pulsed dendritic cells (DC) followed by challenge with hHER-2/B16 (B16-HER2) tumor cells. The graph depicts the results of an experiment employing 10 mice per group.

[0057] FIGS. 6A and 6B are graphs depicting the survival of mice pre-immunized with the indicated antigen followed by tumor challenge with E.HER2 (FIG. 6A) and HER2/pCR3.1 (FIG. 6B). Experiments depicted in FIGS. 6A and 6B employ 8 mice per group.

[0058] FIGS. 7A and 7B are graphs depicting the survival of mice pre-immunized with the indicated antigen-pulsed dendritic cells followed by tumor challenge with E.PAP (FIG. 7A) and E.HER2 (FIG. 7B). In FIG. 7A, ten mice were immunized with un-pulsed DC (∘), 10 mice immunized with PAP•hGM-CSF-pulsed DC (Δ), 9 mice immunized with DC that were pre-pulsed with PAP-derived Arf peptides ((▪); Tabel 1). All animals on this panel were challenged with E.PAP. In FIG. 7B, ten mice immunized with un-pulsed DC (∘), 10 mice immunized with PAP•hGM-CSF-pulsed DC (Δ), 10 mice immunized with DC pre-pulsed with PAP-derived Arf peptides (▪), 10 mice immunized with HER500•hGM-CSF-pulsed DC (⋄). All animals on this panel were challenged with E.HER2.

[0059] FIG. 8A is a graph depicting survival of T cell depleted mice after immunizations with Ag-pulsed DC and the subsequent challenge with E.HER2. Ten mice immunized with un-pulsed DC (∘); 10 mice immunized with HER-2-derived Arf pool B3 peptides (Δ); 9 CD4 T cell-depleted mice immunized with HER-2-derived Arf pool B3 peptides (▪); 10 CD8 T cell-depleted mice immunized with HER-2-derived Arf pool B3 peptides (♦).

[0060] FIG. 8B is a graph depicting survival of mice immunized with subgroups of Arf peptides from HER-2-derived pool B3 and subsequently challenged with E.HER2 tumor. Nine mice immunized with un-pulsed DC (∘), 10 mice immunized with DC that were pre-pulsed with the entire pool B3 (♦), 10 mice immunized with DC that were pre-pulsed with 4 peptides 3a-d (▪), 10 mice immunized with DC that were pre-pulsed with 4 peptides 3e-h (□), 9 mice immunized with DC that were pre-pulsed with 4 peptides 3i-1 (σ), 10 mice immunized with DC that were pre-pulsed with 4 peptides 3m-p (Δ), 10 mice immunized with DC that were pre-pulsed with 4 peptides 3q-t (λ), 9 mice immunized with DC that were pre-pulsed with 5 peptides 3u-y ( [symbol] ).

[0061] FIG. 8C is a graph depicting survival of mice that were immunized with individual Arf peptides from HER-2-derived pool B3 and subsequently challenged with E.HER2 tumor. Immunizing DC were either un-pulsed (λ), pulsed with the entire HER-2-derived Arf pool B3 (+), or with the individual peptides 3e (□), 3f (x), 3g (−), 3h (▪), 3u (ç), 3v (∘), 3w (♦), 3x (σ), 3y ( [symbol] ).

[0062] FIG. 8D is a graph depicting polyclonal ex vivo cytolytic responses of CD8⁺ T cell hybridoma B6-H9.B7 against indicated stimulator c ells (EL-4 ( [symbol] ), 3H+3 G pulsed E L-4 (▴), and E-HER2 (▪)) following immunization of C57BL/6 mice with HER-2 derived ARF B3 E-H peptides.

[0063] FIG. 8E is a bar graph depicting responses of CD8+ T cell hybridoma B6-H9-B7 against the indicated stimulator cells.

[0064] SEQ ID NO: 1 is the amino acid sequence of human tyrosine kinase receptor (hHER-2; Genbank Accession No. M11730).

[0065] SEQ ID NO: 2 is the nucleotide sequence of the polynucleotide encoding the amino acid sequence of hHER-2 presented in SEQ ID NO: 1.

[0066] SEQ ID NO: 3 is the amino acid sequence of human telomerase reverse transcriptase (hTERT; Genbank Accession No. NM_{—}003219).

[0067] SEQ ID NO: 4 is the nucleotide sequence of the polynucleotide encoding the amino acid sequence of hTERT presented in SEQ ID NO: 3.

[0068] SEQ ID NO: 5 is the amino acid sequence of mouse telomerase reverse transcriptase (mTERT; Genbank Accession No. NM_{—}009354).

[0069] SEQ ID NO: 6 is the nucleotide sequence of the polynucleotide encoding the amino acid sequence of mTERT presented in SEQ ID NO: 5.

[0070] SEQ ID NO: 7 is the amino acid sequence of human transient receptor potential cation channel 8 (hTrpP8; Genbank Accession No. NM 024080).

[0071] SEQ ID NO: 8 is the nucleotide sequence of the polynucleotide encoding the amino acid sequence of hTrpP8 presented in SEQ ID NO: 7.

[0072] SEQ ID NO: 9 is the amino acid sequence of human prostatic acid phosphatase (hPAP; Genbank Accession No. M34840).

[0073] SEQ ID NO: 10 is the nucleotide sequence of the polynucleotide encoding the amino acid sequence of hPAP presented in SEQ ID NO: 9.

[0074] SEQ ID NO: 11 is the amino acid sequence of human prostatic acid phosphatase (hPAP; Genbank Accession No. X53605).

[0075] SEQ ID NO: 12 is the nucleotide sequence of the polynucleotide encoding the amino acid sequence of hPAP presented in SEQ ID NO: 11.

[0076] SEQ ID NO: 13 is the nucleotide sequence of HER500-rGM-CSF (Genbank Accession No. AX268288).

[0077] SEQ ID NO: 14 is the nucleotide sequence of HER300.

[0078] SEQ ID NOs: 15-32 are human HER-2 alternative reading frame polypeptides derived from the polynucleotide sequence presented herein as SEQ ID NO: 2.

[0079] SEQ ID NOs: 33-95 are human HER-2 alternative reading frame polypeptides derived based upon the human HER-2 alternative reading frame polypeptides presented herein as SEQ ID NOs: 15-32 (see, Example 2).

[0080] SEQ ID NOs: 96-111 are mouse TERT alternative reading frame polypeptides derived from the polynucleotide sequence presented herein as SEQ ID NO: 6.

[0081] SEQ ID NOs: 112-194 are mouse TERT alternative reading frame polypeptides derived based upon the mouse TERT alternative reading frame polypeptides presented herein as SEQ ID NOs: 96-111 (see, Example 3).

[0082] SEQ ID NOs: 195-202 are human TERT alternative reading frame polypeptides derived from the polynucleotide sequence presented herein as SEQ ID NO: 4.

[0083] SEQ ID NOs: 203-219 are human TrpP8 alternative reading frame polypeptides derived from the polynucleotide sequence presented herein as SEQ ID NO: 8.

[0084] SEQ ID NOs: 220-247 are human TrpP8 alternative reading frame polypeptides derived based upon the human TrpP8 alternative reading frame polypeptides presented herein as SEQ ID NOs: 203-219 (see, Example 4).

[0085] SEQ ID NOs: 248-256 are human PAP alternative reading frame polypeptides derived from the polynucleotide sequence presented herein as SEQ ID NO: 10.

[0086] SEQ ID NOs: 257-279 are human PAP alternative reading frame polypeptides derived based upon the human PAP alternative reading frame polypeptides presented herein as SEQ ID NOs: 248-256.

[0087] SEQ ID NOs: 280-289 are human PAP alternative reading frame polypeptides derived from the polynucleotide sequence presented herein as SEQ ID NO: 12.

[0088] SEQ ID NO: 290 is the nucleotide sequence of a CMV forward primer presented herein in Example 8.

[0089] SEQ ID NO: 291 is the nucleotide sequence of a CMV forward primer presented herein in Example 8.

[0090] SEQ ID NO: 292 is the nucleotide sequence of a HER-2/neu reverse primer presented herein in Example 8.

[0091] SEQ ID NO: 293 is the nucleotide sequence of a HER-2/neu reverse primer presented herein in Example 8.

[0092] SEQ ID NO: 294 is the amino acid sequence of human carbonic anhydrase IX (hCA9; Genbank Accession No. NM_{—}001216).

[0093] SEQ ID NO: 295 is the nucleotide sequence of the polynucleotide encoding the amino acid sequence of hCA9 presented in SEQ ID NO: 294.

[0094] SEQ ID NOs: 296-300 are human CA9 alternative reading frame polypeptides derived from the polynucleotide sequence presented herein as SEQ ID NO: 295.

[0095] SEQ ID NO: 301 is the amino acid sequence of human carcinoembryonic antigen (hCEA; Genbank Accession No. M17303).

[0096] SEQ ID NO: 302 is the nucleotide sequence of the polynucleotide encoding the amino acid sequence of hCEA presented in SEQ ID NO: 301.

[0097] SEQ ID NOs: 303-319 are human CEA alternative reading frame polypeptides derived from the polynucleotide sequence presented herein as SEQ ID NO: 302.

[0098] SEQ ID NO: 320 is the amino acid sequence of the full-length sequence of hCA9 rf1 derived by deleting stop codons (TGA, TAA, and TAG) and by deleting residues between stop codons that encode less than 9 consecutive residues.

[0099] SEQ ID NO: 321 is the nucleotide sequence encoding the full-length amino acid sequence of hCA9 rf1 depicted in SEQ ID NO: 320.

[0100] SEQ ID NO: 322 is the amino acid sequence of the full-length sequence of hCA9 rf2 derived by deleting stop codons (TGA, TAA, and TAG) and by deleting residues between stop codons that encode less than 9 consecutive residues.

[0101] SEQ ID NO: 323 is the nucleotide sequence encoding the full-length amino acid sequence of hCA9 rf2 depicted in SEQ ID NO: 322.

[0102] SEQ ID NO: 324 is the amino acid sequence of the full-length sequence of hCEA rf1 derived by deleting stop codons (TGA, TAA, and TAG) and by deleting residues between stop codons that encode less than 9 consecutive residues.

[0103] SEQ ID NO: 325 is the nucleotide sequence encoding the full-length amino acid sequence of hCEA rf1 depicted in SEQ ID NO: 324.

[0104] SEQ ID NO: 326 is the amino acid sequence of the full-length sequence of hCEA rf2 derived by deleting stop codons (TGA, TAA, and TAG) and by deleting residues between stop codons that encode less than 9 consecutive residues.

[0105] SEQ ID NO: 327 is the nucleotide sequence encoding the full-length amino acid sequence of hCEA rf2 depicted in SEQ ID NO: 326.

[0106] SEQ ID NO: 328 is the amino acid sequence of the full-length sequence of hHER2 rf1 derived by deleting stop codons (TGA, TAA, and TAG) and by deleting residues between stop codons that encode less than 9 consecutive residues.

[0107] SEQ ID NO: 329 is the nucleotide sequence encoding the full-length amino acid sequence of hHER2 rf1 depicted in SEQ ID NO: 328.

[0108] SEQ ID NO: 330 is the amino acid sequence of the full-length sequence of hHER2 rf2 derived by deleting stop codons (TGA, TAA, and TAG) and by deleting residues between stop codons that encode less than 9 consecutive residues.

[0109] SEQ ID NO: 331 is the nucleotide sequence encoding the full-length amino acid sequence of hHER2 rf2 depicted in SEQ ID NO: 330.

[0110] SEQ ID NO: 332 is the amino acid sequence of the full-length sequence of hPAP rf1 derived by deleting stop codons (TGA, TAA, and TAG) and by deleting residues between stop codons that encode less than 9 consecutive residues.

[0111] SEQ ID NO: 333 is the nucleotide sequence encoding the full-length amino acid sequence of hPAP rf1 depicted in SEQ ID NO: 332.

[0112] SEQ ID NO: 334 is the amino acid sequence of the full-length sequence of hPAP rf2 derived by deleting stop codons (TGA, TAA, and TAG) and by deleting residues between stop codons that encode less than 9 consecutive residues.

[0113] SEQ ID NO: 335 is the nucleotide sequence encoding the full-length amino acid sequence of hPAP rf2 depicted in SEQ ID NO: 334.

[0114] SEQ ID NO: 336 is the amino acid sequence of the full-length sequence of hTERT rf1 derived by deleting stop codons (TGA, TAA, and TAG) and by deleting residues between stop codons that encode less than 9 consecutive residues.

[0115] SEQ ID NO: 337 is the nucleotide sequence encoding the full-length amino acid sequence of hTERT rf1 depicted in SEQ ID NO: 336.

[0116] SEQ ID NO: 338 is the amino acid sequence of the full-length sequence of hTERT rf2 derived by deleting stop codons (TGA, TAA, and TAG) and by deleting residues between stop codons that encode less than 9 consecutive residues.

[0117] SEQ ID NO: 339 is the nucleotide sequence encoding the full-length amino acid sequence of hTERT rf2 depicted in SEQ ID NO: 338.

[0118] SEQ ID NO: 340 is the amino acid sequence of the full-length sequence of hTrpP8 rf1 derived by deleting stop codons (TGA, TAA, and TAG) and by deleting residues between stop codons that encode less than 9 consecutive residues.

[0119] SEQ ID NO: 341 is the nucleotide sequence encoding the full-length amino acid sequence of hTrpP8 rf1 depicted in SEQ ID NO: 340.

[0120] SEQ ID NO: 342 is the amino acid sequence of the full-length sequence of hTrpP8 rf2 derived by deleting stop codons (TGA, TAA, and TAG) and by deleting residues between stop codons that encode less than 9 consecutive residues.

[0121] SEQ ID NO: 343 is the nucleotide sequence encoding the full-length amino acid sequence of hTrpP8 rf2 depicted in SEQ ID NO: 342.

[0122] SEQ ID NO: 344 is the amino acid sequence of human prostate-specific membrane antigen (hPSMA; Genbank Accession No. NM_{—}004467).

[0123] SEQ ID NO: 345 is the nucleotide sequence of the polynucleotide encoding the amino acid sequence of hPSMA presented in SEQ ID NO: 344.

[0124] SEQ ID NO: 346 is the amino acid sequence of the full-length sequence of hPSMA rf1 derived by deleting stop codons (TGA, TAA, and TAG) and by deleting residues between stop codons that encode less than 9 consecutive residues.

[0125] SEQ ID NO: 347 is the nucleotide sequence encoding the full-length amino acid sequence of hPSMA rf1 depicted in SEQ ID NO: 346.

[0126] SEQ ID NO: 348 is the amino acid sequence of the full-length sequence of hPSMA rf2 derived by deleting stop codons (TGA, TAA, and TAG) and by deleting residues between stop codons that encode less than 9 consecutive residues.

[0127] SEQ ID NO: 349 is the nucleotide sequence encoding the full-length amino acid sequence of hPSMA rf2 depicted in SEQ ID NO: 346.

[0128] SEQ ID NO: 350-367 are human PSMA alternative reading frame polypeptides derived from the polynucleotide sequence presented herein as SEQ ID NO: 345.

[0129] SEQ ID NO: 368 is the amino acid sequence of human prostate-specific antigen (hPSA; Genbank Accession No. M26663).

[0130] SEQ ID NO: 369 is the nucleotide sequence of the polynucleotide encoding the amino acid sequence of hPSA presented in SEQ ID NO: 368.

[0131] SEQ ID NO: 370 is the amino acid sequence of the full-length sequence of hPSA rf1 derived by deleting stop codons (TGA, TAA, and TAG) and by deleting residues between stop codons that encode less than 9 consecutive residues.

[0132] SEQ ID NO: 371 is the nucleotide sequence encoding the full-length amino acid sequence of hPSA rf1 depicted in SEQ ID NO: 370.

[0133] SEQ ID NO: 372 is the amino acid sequence of the full-length sequence of hPSA rf2 derived by deleting stop codons (TGA, TAA, and TAG) and by deleting residues between stop codons that encode less than 9 consecutive residues.

[0134] SEQ ID NO: 373 is the nucleotide sequence encoding the full-length amino acid sequence of hPSA rf2 depicted in SEQ ID NO: 372.

[0135] SEQ ID NO: 374-379 are human PSA alternative reading frame polypeptides derived from the polynucleotide sequence presented herein as SEQ ID NO: 369.

[0136] SEQ ID NO: 380 is the amino acid sequence of human p53 cellular tumor antigen (hp53; Genbank Accession No. M14695).

[0137] SEQ ID NO: 381 is the nucleotide sequence of the polynucleotide encoding the amino acid sequence of hp53 presented in SEQ ID NO: 380.

[0138] SEQ ID NO: 382 is the amino acid sequence of the full-length sequence of hp53 rf1 derived by deleting stop codons (TGA, TAA, and TAG) and by deleting residues between stop codons that encode less than 9 consecutive residues.

[0139] SEQ ID NO: 383 is the nucleotide sequence encoding the full-length amino acid sequence of hp53 rf1 depicted in SEQ ID NO: 382.

[0140] SEQ ID NO: 384 is the amino acid sequence of the full-length sequence of hp53 rf2 derived by deleting stop codons (TGA, TAA, and TAG) and by deleting residues between stop codons that encode less than 9 consecutive residues.

[0141] SEQ ID NO: 385 is the nucleotide sequence encoding the full-length amino acid sequence of hp53 rf2 depicted in SEQ ID NO: 384.

[0142] SEQ ID NO: 386-390 are human p53 alternative reading frame polypeptides derived from the polynucleotide sequence presented herein as SEQ ID NO: 381.

[0143] SEQ ID NO: 391 is the amino acid sequence of human P-glycoprotein (hPGY1; Genbank Accession No. M14758).

[0144] SEQ ID NO: 392 is the nucleotide sequence of the polynucleotide encoding the amino acid sequence of hPGY1 presented in SEQ ID NO: 391.

[0145] SEQ ID NO: 393 is the amino acid sequence of the full-length sequence of hPGY1 rf1 derived by deleting stop codons (TGA, TAA, and TAG) and by deleting residues between stop codons that encode less than 9 consecutive residues.

[0146] SEQ ID NO: 394 is the nucleotide sequence encoding the full-length amino acid sequence of hPGY1 rf1 depicted in SEQ ID NO: 393.

[0147] SEQ ID NO: 395 is the amino acid sequence of the full-length sequence of hPGY1 rf2 derived by deleting stop codons (TGA, TAA, and TAG) and by deleting residues between stop codons that encode less than 9 consecutive residues.

[0148] SEQ ID NO: 396 is the nucleotide sequence encoding the full-length amino acid sequence of hPGY1 rf2 depicted in SEQ ID NO: 395.

[0149] SEQ ID NO: 397-422 are human PGY1 alternative reading frame polypeptides derived from the polynucleotide sequence presented herein as SEQ ID NO: 392.

[0150] SEQ ID NO: 423 is the amino acid sequence of human alpha-fetoprotein (hAFP; Genbank Accession No. NM_{—}001134).

[0151] SEQ ID NO: 424 is the nucleotide sequence of the polynucleotide encoding the amino acid sequence of hAFP presented in SEQ ID NO: 423.

[0152] SEQ ID NO: 425 is the amino acid sequence of the full-length sequence of hAFP rf1 derived by deleting stop codons (TGA, TAA, and TAG) and by deleting residues between stop codons that encode less than 9 consecutive residues.

[0153] SEQ ID NO: 426 is the nucleotide sequence encoding the full-length amino acid sequence of hAFP rf1 depicted in SEQ ID NO: 425.

[0154] SEQ ID NO: 427 is the amino acid sequence of the full-length sequence of hAFP rf2 derived by deleting stop codons (TGA, TAA, and TAG) and by deleting residues between stop codons that encode less than 9 consecutive residues.

[0155] SEQ ID NO: 428 is the nucleotide sequence encoding the full-length amino acid sequence of hAFP rf2 depicted in SEQ ID NO: 427.

[0156] SEQ ID NO: 429-439 are human AFP alternative reading frame polypeptides derived from the polynucleotide sequence presented herein as SEQ ID NO: 424.

[0157] SEQ ID NO: 440 is the amino acid sequence of human mucin precursor (hMUC1; Genbank Accession No. AF125525).

[0158] SEQ ID NO: 441 is the nucleotide sequence of the polynucleotide encoding the amino acid sequence of hMUC1 presented in SEQ ID NO: 440.

[0159] SEQ ID NO: 442 is the amino acid sequence of the full-length sequence of hMUC1 rf1 derived by deleting stop codons (TGA, TAA, and TAG) and by deleting residues between stop codons that encode less than 9 consecutive residues.

[0160] SEQ ID NO: 443 is the nucleotide sequence encoding the full-length amino acid sequence of hMUC1 rf1 depicted in SEQ ID NO: 442.

[0161] SEQ ID NO: 444 is the amino acid sequence of the full-length sequence of hMUC1 rf2 derived by deleting stop codons (TGA, TAA, and TAG) and by deleting residues between stop codons that encode less than 9 consecutive residues.

[0162] SEQ ID NO: 445 is the nucleotide sequence encoding the full-length amino acid sequence of hMUC1 rf2 depicted in SEQ ID NO: 444.

[0163] SEQ ID NO: 446-450 are human MUC1 alternative reading frame polypeptides derived from the polynucleotide sequence presented herein as SEQ ID NO: 442.

[0164] SEQ ID NO: 451 is the amino acid sequence of human preferentially expressed antigen of melanoma (hPRAME; Genbank Accession No. U65011).

[0165] SEQ ID NO: 452 is the nucleotide sequence of the polynucleotide encoding the amino acid sequence of hPRAME presented in SEQ ID NO: 451.

[0166] SEQ ID NO: 453 is the amino acid sequence of the full-length sequence of hPRAME rf1 derived by deleting stop codons (TGA, TAA, and TAG) and by deleting residues between stop codons that encode less than 9 consecutive residues.

[0167] SEQ ID NO: 454 is the nucleotide sequence encoding the full-length amino acid sequence of hPRAME rf1 depicted in SEQ ID NO: 453.

[0168] SEQ ID NO: 455 is the amino acid sequence of the full-length sequence of hPRAME rf2 derived by deleting stop codons (TGA, TAA, and TAG) and by deleting residues between stop codons that encode less than 9 consecutive residues.

[0169] SEQ ID NO: 456 is the nucleotide sequence encoding the full-length amino acid sequence of hPRAME rf2 depicted in SEQ ID NO: 455.

[0170] SEQ ID NO: 457-466 are human PRAME alternative reading frame polypeptides derived from the polynucleotide sequence presented herein as SEQ ID NO: 452.

[0171] SEQ ID NO: 467 is the amino acid sequence of human ephrin receptor (hEPHA3; Genbank Accession No. AF213459).

[0172] SEQ ID NO: 468 is the nucleotide sequence of the polynucleotide encoding the amino acid sequence of hEPHA3 presented in SEQ ID NO: 467.

[0173] SEQ ID NO: 469 is the amino acid sequence of the full-length sequence of hEPHA3 rf1 derived by deleting stop codons (TGA, TAA, and TAG) and by deleting residues between stop codons that encode less than 9 consecutive residues.

[0174] SEQ ID NO: 470 is the nucleotide sequence encoding the full-length amino acid sequence of hEPHA3 rf1 depicted in SEQ ID NO: 469.

[0175] SEQ ID NO: 471 is the amino acid sequence of the full-length sequence of hEPHA3 rf2 derived by deleting stop codons (TGA, TAA, and TAG) and by deleting residues between stop codons that encode less than 9 consecutive residues.

[0176] SEQ ID NO: 472 is the nucleotide sequence encoding the full-length amino acid sequence of hEPHA3 rf2 depicted in SEQ ID NO: 471.

[0177] SEQ ID NO: 473-494 are human EPHA3 alternative reading frame polypeptides derived from the polynucleotide sequence presented herein as SEQ ID NO: 468.

[0178] SEQ ID NO: 495 is the amino acid sequence of human peptidyl-prolyl isomerase and essential mitotic regulator (hPIN1; Genbank Accession No. U49070).

[0179] SEQ ID NO: 496 is the nucleotide sequence of the polynucleotide encoding the amino acid sequence of hPIN1 presented in SEQ ID NO: 495.

[0180] SEQ ID NO: 497 is the amino acid sequence of the full-length sequence of hPIN1 rf1 derived by deleting stop codons (TGA, TAA, and TAG) and by deleting residues between stop codons that encode less than 9 consecutive residues.

[0181] SEQ ID NO: 498 is the nucleotide sequence encoding the full-length amino acid sequence of hPIN1 rf1 depicted in SEQ ID NO: 497.

[0182] SEQ ID NO: 499 is the amino acid sequence of the full-length sequence of hPIN1 rf2 derived by deleting stop codons (TGA, TAA, and TAG) and by deleting residues between stop codons that encode less than 9 consecutive residues.

[0183] SEQ ID NO: 500 is the nucleotide sequence encoding the full-length amino acid sequence of hPIN1 rf2 depicted in SEQ ID NO: 499.

[0184] SEQ ID NO: 501-502 are human PIN1 alternative reading frame polypeptides derived from the polynucleotide sequence presented herein as SEQ ID NO: 496.

[0185] SEQ ID NO: 503 is the amino acid sequence of human BASE (hBASE; Genbank Accession No. AY180924).

[0186] SEQ ID NO: 504 is the nucleotide sequence of the polynucleotide encoding the amino acid sequence of hBASE presented in SEQ ID NO: 503.

[0187] SEQ ID NO: 505 is the amino acid sequence of the full-length sequence of hBASE rf1 derived by deleting stop codons (TGA, TAA, and TAG) and by deleting residues between stop codons that encode less than 9 consecutive residues.

[0188] SEQ ID NO: 506 is the nucleotide sequence encoding the fill-length amino acid sequence of hBASE rf1 depicted in SEQ ID NO: 505.

[0189] SEQ ID NO: 507 is the amino acid sequence of the full-length sequence of hBASE rf2 derived by deleting stop codons (TGA, TAA, and TAG) and by deleting residues between stop codons that encode less than 9 consecutive residues.

[0190] SEQ ID NO: 508 is the nucleotide sequence encoding the full-length amino acid sequence of hBASE rf2 depicted in SEQ ID NO: 507.

[0191] SEQ ID NO: 509-513 are human BASE alternative reading frame polypeptides derived from the polynucleotide sequence presented herein as SEQ ID NO: 504.

[0192] SEQ ID NO: 514 is the amino acid sequence of human prostate stem cell antigen (hPSCA; Genbank Accession No. AF043498).

[0193] SEQ ID NO: 515 is the nucleotide sequence of the polynucleotide encoding the amino acid sequence of hPSCA presented in SEQ ID NO: 514.

[0194] SEQ ID NO: 516 is the amino acid sequence of the full-length sequence of hPSCA rf1 derived by deleting stop codons (TGA, TAA, and TAG) and by deleting residues between stop codons that encode less than 9 consecutive residues.

[0195] SEQ ID NO: 517 is the nucleotide sequence encoding the full-length amino acid sequence of hPSCA rf1 depicted in SEQ ID NO: 516.

[0196] SEQ ID NO: 518 is the amino acid sequence of the full-length sequence of hPSCA rf2 derived by deleting stop codons (TGA, TAA, and TAG) and by deleting residues between stop codons that encode less than 9 consecutive residues.

[0197] SEQ ID NO: 519 is the nucleotide sequence encoding the full-length amino acid sequence of hPSCA rf2 depicted in SEQ ID NO: 518.

[0198] SEQ ID NO: 520-521 are human PSCA alternative reading frame polypeptides derived from the polynucleotide sequence presented herein as SEQ ID NO: 515.

[0199] SEQ ID NO: 522 is the nucleotide sequence of a forward primer for PCR analysis of mTERT mRNA expression.

[0200] SEQ ID NO: 523 is the nucleotide sequence of a reverse primer for PCR analysis of mTERT mRNA expression.

[0201] SEQ ID NO: 524 is the nucleotide sequence of a forward primer for PCR analysis of mHPRT mRNA expression.

[0202] SEQ ID NO: 525 is the nucleotide sequence of a reverse primer for PCR analysis of mHPRT mRNA expression.

[0203] SEQ ID NO: 526 is the amino acid sequence of the hPAP alternative reading frame peptide designated herein as 3-41/rf2-3.

[0204] SEQ ID NO: 527 is the amino acid sequence of the hPAP alternative reading frame peptide designated herein as 5-76/rf1-5a.

[0205] SEQ ID NO: 528 is the amino acid sequence of the hPAP alternative reading frame peptide designated herein as 5-76/rf1-5b.

[0206] SEQ ID NO: 529 is the amino acid sequence of the hPAP alternative reading frame peptide designated herein as 5-76/rf1-5c.

[0207] SEQ ID NO: 530 is the amino acid sequence of the hPAP alternative reading frame peptide designated herein as 131-172/rf1-131.

[0208] SEQ ID NO: 531 is the amino acid sequence of the hPAP alternative reading frame peptide designated herein as 186-236/rf2-186.

[0209] SEQ ID NO: 532 is the amino acid sequence of the hPAP alternative reading frame peptide designated herein as 281-337/rf1-281a.

[0210] SEQ ID NO: 533 is the amino acid sequence of the hPAP alternative reading frame peptide designated herein as 281-337/rf1-281b.

[0211] SEQ ID NO: 534 is the amino acid sequence of the hPAP alternative reading frame peptide designated herein as 593-694/rf1-593a.

[0212] SEQ ID NO: 535 is the amino acid sequence of the hPAP alternative reading frame peptide designated herein as 593-694/rf1-593b.

[0213] SEQ ID NO: 536 is the amino acid sequence of the hPAP alternative reading frame peptide designated herein as 593-694/rf1-593c.

[0214] SEQ ID NO: 537 is the amino acid sequence of the hPAP alternative reading frame peptide designated herein as 593-694/rf1-593d.

[0215] SEQ ID NO: 538 is the amino acid sequence of the hPAP alternative reading frame peptide designated herein as 593-694/rf1-593e.

[0216] SEQ ID NO: 539 is the amino acid sequence of the hPAP alternative reading frame peptide designated herein as 593-694/rf1-593f.

[0217] SEQ ID NO: 540 is the amino acid sequence of the hPAP alternative reading frame peptide designated herein as 740-811/rf1-740a.

[0218] SEQ ID NO: 541 is the amino acid sequence of the hPAP alternative reading frame peptide designated herein as 740-811/rf1-740b.

[0219] SEQ ID NO: 542 is the amino acid sequence of the hPAP alternative reading frame peptide designated herein as 740-811/rf1-740c.

[0220] SEQ ID NO: 543 is the amino acid sequence of the hPAP alternative reading frame peptide designated herein as 902-943/rf1-902.

[0221] SEQ ID NO: 544 is the amino acid sequence of the hPAP alternative reading frame peptide designated herein as 998-1087/rf1-998a.

[0222] SEQ ID NO: 545 is the amino acid sequence of the hPAP alternative reading frame peptide designated herein as 998-1087/rf1-998b.

[0223] SEQ ID NO: 546 is the amino acid sequence of the hPAP alternative reading frame peptide designated herein as 998-1087/rf1-998c.

[0224] SEQ ID NO: 547 is the amino acid sequence of the hPAP alternative reading frame peptide designated herein as 998-1087/rf1-998d.

[0225] SEQ ID NO: 548 is the amino acid sequence of the hPAP alternative reading frame peptide designated herein as 998-1087/rf1-998e.

[0226] SEQ ID NO: 549 is the nucleotide sequence of human SURVIVIN (Genbank Accession No. AF077350).

[0227] SEQ ID NO: 550 is the amino acid sequences of the polypeptide encoded by the human SURVIVIN nucleotide sequence presented in SEQ ID NO: 549.

[0228] SEQ ID NO: 551 is the amino acid sequence of the hSURVIVIN alternative reading frame peptide designated herein as 2-220 rf1-2.

[0229] SEQ ID NO: 552 is the amino acid sequence of the hSURVIVIN alternative reading frame peptide designated herein as 3-143 rf2-3.

[0230] SEQ ID NO: 553 is the amino acid sequence of the hSURVIVIN alternative reading frame rf1.

[0231] SEQ ID NO: 554 is the nucleotide sequence encoding the hSURVIVIN alternative reading frame rf1 presented herein as SEQ ID NO: 553.

[0232] SEQ ID NO: 555 is the amino acid sequence of the hSURVIVIN alternative reading frame rf2.

[0233] SEQ ID NO: 556 is the nucleotide sequence encoding the hSURVIVIN alternative reading frame rf2 presented herein as SEQ ID NO: 555.

[0234] SEQ ID NO: 557 is the nucleotide sequence of human WTI (Genbank Accession No. NM_{—}000378).

[0235] SEQ ID NO: 558 is the amino acid sequence of hWTI encoded by the nucleotide sequence presented herein as SEQ ID NO: 557.

[0236] SEQ ID NO: 559 is the amino acid sequence of the hWTI alternative reading frame peptide designated herein as 3-386 rf2-3.

[0237] SEQ ID NO: 560 is the amino acid sequence of the hWTI alternative reading frame peptide designated herein as 500-649 rf1-500.

[0238] SEQ ID NO: 561 is the amino acid sequence of the hWTI alternative reading frame peptide designated herein as 702-770 rf2-702.

[0239] SEQ ID NO: 562 is the amino acid sequence of the hWTI alternative reading frame rf1.

[0240] SEQ ID NO: 563 is the nucleotide sequence encoding the hWTI alternative reading frame rf1 presented herein as SEQ ID NO: 562.

[0241] SEQ ID NO: 564 is the amino acid sequence of the hWTI alternative reading frame rf2.

[0242] SEQ ID NO: 565 is the nucleotide sequence encoding the hWTI alternative reading frame rf2 presented herein as SEQ ID NO: 564.

[0243] SEQ ID NO: 566 is the nucleotide sequence of human SGA-M1 (Genbank Accession No. AY192728).

[0244] SEQ ID NO: 567 is the amino acid sequence of hSGA-M1 presented herein as SEQ ID NO: 566.

[0245] SEQ ID NO: 568 is the amino acid sequence of the hSGA-M1 alternative reading frame peptide designated herein as 2-92 rf1-2.

[0246] SEQ ID NO: 569 is the amino acid sequence of the hSGA-M1 alternative reading frame peptide designated herein as 3-71 rf2-3.

[0247] SEQ ID NO: 570 is the amino acid sequence of the hSGA-M1 alternative reading frame peptide designated herein as 71-205 rf1-71.

[0248] SEQ ID NO: 571 is the amino acid sequence of the hSGA-M1 alternative reading frame peptide designated herein as 227-328 rf1-227.

[0249] SEQ ID NO: 572 is the amino acid sequence of the hSGA-M1 alternative reading frame peptide designated herein as 440-469 rf1-440.

[0250] SEQ ID NO: 573 is the amino acid sequence of the hSGA-M1 alternative reading frame peptide designated herein as 477-521 rf2-477.

[0251] SEQ ID NO: 574 is the amino acid sequence of the hSGA-M1 alternative reading frame peptide designated herein as 524-559 rf2-524.

[0252] SEQ ID NO: 575 is the amino acid sequence of the hSGA-M1 alternative reading frame rf1.

[0253] SEQ ID NO: 576 is the nucleotide sequence encoding the hSGA-M1 alternative reading frame rf1 presented herein as SEQ ID NO: 575.

[0254] SEQ ID NO: 577 is the amino acid sequence of the hSGA-M1 alternative reading frame rf2.

[0255] SEQ ID NO: 578 is the nucleotide sequence encoding the hSGA-M1 alternative reading frame rf1 presented herein as SEQ ID NO: 577.

[0256] SEQ ID NO: 579 is the nucleotide sequence of human RCAS1 (Genbank Accession No. AF006265).

[0257] SEQ ID NO: 580 is the amino acid sequence of hRCAS1 encoded by the nucleotide sequence presented herein as SEQ ID NO: 579.

[0258] SEQ ID NO: 581 is the amino acid sequence of the hRCAS1 alternative reading frame peptide designated herein as 2-43 rf1-2.

[0259] SEQ ID NO: 582 is the amino acid sequence of the hRCAS1 alternative reading frame peptide designated herein as 78-137 rf2-78.

[0260] SEQ ID NO: 583 is the amino acid sequence of the hRCAS1 alternative reading frame peptide designated herein as 167-211 rf1-167.

[0261] SEQ ID NO: 584 is the amino acid sequence of the hRCAS1 alternative reading frame peptide designated herein as 230-292 rf1-230.

[0262] SEQ ID NO: 585 is the amino acid sequence of the hRCAS1 alternative reading frame peptide designated herein as 365-391 rf1-365.

[0263] SEQ ID NO: 586 is the amino acid sequence of the hRCAS1 alternative reading frame peptide designated herein as 470-641 rf2-470.

[0264] SEQ ID NO: 587 is the amino acid sequence of the hRCAS1 alternative reading frame peptide designated herein as 474-517 rf1-474.

[0265] SEQ ID NO: 588 is the amino acid sequence of the hRCAS1 alternative reading frame rf1.

[0266] SEQ ID NO: 589 is the nucleotide sequence encoding the hRCAS1 alternative reading frame rf1 presented herein as SEQ ID NO: 588.

[0267] SEQ ID NO: 590 is the amino acid sequence of the hRCAS1 alternative reading frame rf2.

[0268] SEQ ID NO: 591 is the nucleotide sequence encoding the hRCAS1 alternative reading frame rf1 presented herein as SEQ ID NO: 590.

[0269] SEQ ID NO: 592 is the nucleotide sequence of human CYP1B1 (Genbank Accession No. NM_{—}000104).

[0270] SEQ ID NO: 593 is the amino acid sequence of CYP1B1 encoded by the nucleotide sequence presented herein as SEQ ID NO: 592.

[0271] SEQ ID NO: 594 is the amino acid sequence of the hCYP1B1 alternative reading frame peptide designated herein as 2-37 rf1-2.

[0272] SEQ ID NO: 595 is the amino acid sequence of the hCYP1B1 alternative reading frame peptide designated herein as 293-451 rf1-293.

[0273] SEQ ID NO: 596 is the amino acid sequence of the hCYP1B1 alternative reading frame peptide designated herein as 1052-1279 rf1-1052.

[0274] SEQ ID NO: 597 is the amino acid sequence of the hCYP1B1 alternative reading frame peptide designated herein as 1556-1630 rf1-1556.

[0275] SEQ ID NO: 598 is the amino acid sequence of the hCYP1B1 alternative reading frame peptide designated herein as 3-665 rf2-3.

[0276] SEQ ID NO: 599 is the amino acid sequence of the hCYP1B1 alternative reading frame rf1.

[0277] SEQ ID NO: 600 is the nucleotide sequence encoding the hCYP1B1 alternative reading frame rf1 presented herein as SEQ ID NO: 599.

[0278] SEQ ID NO: 601 is the amino acid sequence of the hCYP1B1 alternative reading frame rf2.

[0279] SEQ ID NO: 602 is the nucleotide sequence encoding the hCYP1B1 alternative reading frame rf2 presented herein as SEQ ID NO: 601.

[0280] SEQ ID NO: 603 is the nucleotide sequence of hAFP (Genbank Accession No. NM_{—}001134) 5′ UTR.

[0281] SEQ ID NO: 604 is the amino acid sequence of hAFP 5′ UTR alternative reading frame rf0 peptides.

[0282] SEQ ID NO: 605 is the amino acid sequence of hAFP 5′ UTR alternative reading frame rf0 peptide A.

[0283] SEQ ID NO: 606 is the amino acid sequence of hAFP 5′ UTR alternative reading frame rf1 peptides.

[0284] SEQ ID NO: 607 is the amino acid sequence of hAFP 5′ UTR alternative reading frame rf1 peptide A.

[0285] SEQ ID NO: 608 is amino acid sequence of hAFP 5′ UTR alternative reading frame rf2 peptide.

[0286] SEQ ID NO: 609 is the nucleotide sequence of hBASE (Genbank Accession No. AY180924) 5′ UTR.

[0287] SEQ ID NO: 610 is the amino acid sequence of hBASE 5′ UTR alternative reading frame rf0 peptides.

[0288] SEQ ID NO: 611 is the amino acid sequence of hBASE 5′ UTR alternative reading frame rf0 peptide A.

[0289] SEQ ID NO: 612 is the amino acid sequence of hBASE 5′ UTR alternative reading frame rf1 peptides.

[0290] SEQ ID NO: 613 is the amino acid sequence of hBASE 5′ UTR alternative reading frame rf1 peptide A.

[0291] SEQ ID NO: 614 is the amino acid sequence of hBASE 5′ UTR alternative reading frame rf2 peptides.

[0292] SEQ ID NO: 615 is the nucleotide sequence of hCA9 (Genbank Accession No. NM_{—}001216) 5′ UTR.

[0293] SEQ ID NO: 616 is the amino acid sequence of hCA9 5′ UTR alternative reading frame rf0 peptides.

[0294] SEQ ID NO: 617 is the amino acid sequence of hCA9 5′ UTR alternative reading frame rf1 peptides.

[0295] SEQ ID NO: 618 is the amino acid sequence of hCA9 5′ UTR alternative reading frame rf2 peptides.

[0296] SEQ ID NO: 619 is the nucleotide sequence of hCEA (Genbank Accession No. M17303) 5′ UTR.

[0297] SEQ ID NO: 620 is the amino acid sequence of hCEA 5′ UTR alternative reading frame rf0 peptides.

[0298] SEQ ID NO: 621 is the amino acid sequence of hCEA 5′ UTR alternative reading frame rf1 peptides.

[0299] SEQ ID NO: 622 is the amino acid sequence of hCEA 5′ UTR alternative reading frame rf1 peptide A.

[0300] SEQ ID NO: 623 is the amino acid sequence of hCEA 5′ UTR alternative reading frame rf1 peptide B.

[0301] SEQ ID NO: 624 is the amino acid sequence of hCEA 5′ UTR alternative reading frame rf2 peptides.

[0302] SEQ ID NO: 625 is the nucleotide sequence of hCYP1B1 (Genbank Accession No. NM_{—}000104) 5′ UTR.

[0303] SEQ ID NO: 626 is the amino acid sequence of hCYPB1 5′ UTR alternative reading frame rf0 peptides.

[0304] SEQ ID NO: 627 is the amino acid sequence of hCYPB1 5′ UTR alternative reading frame rf0 peptide A.

[0305] SEQ ID NO: 628 is the amino acid sequence of hCYPB1 5′ UTR alternative reading frame rf0 peptide B.

[0306] SEQ ID NO: 629 is the amino acid sequence of hCYPB1 5′ UTR alternative reading frame rf0 peptide C.

[0307] SEQ ID NO: 630 is the amino acid sequence of hCYPB1 5′ UTR alternative reading frame rf1 peptides.

[0308] SEQ ID NO: 631 is the amino acid sequence of hCYPB1 5′ UTR alternative reading frame rf1 peptide A.

[0309] SEQ ID NO: 632 is the amino acid sequence of hCYPB1 5′ UTR alternative reading frame rf1 peptide B.

[0310] SEQ ID NO: 633 is the amino acid sequence of hCYPB1 5′ UTR alternative reading frame rf1 peptide C.

[0311] SEQ ID NO: 634 is the amino acid sequence of hCYPB1 5′ UTR alternative reading frame rf2 peptides.

[0312] SEQ ID NO: 635 is the amino acid sequence of hCYPB1 5′ UTR alternative reading frame rf2 peptide A.

[0313] SEQ ID NO: 636 is the amino acid sequence of hCYPB1 5′ UTR alternative reading frame rf2 peptide B.

[0314] SEQ ID NO: 637 is the amino acid sequence of hCYPB1 5′ UTR alternative reading frame rf2 peptide C.

[0315] SEQ ID NO: 638 is the nucleotide sequence of hEphA3 (Genbank Accession No. AF213459) 5′ UTR.

[0316] SEQ ID NO: 639 is the amino acid sequence of hEphA3 5′ UTR alternative reading frame rf0 peptides.

[0317] SEQ ID NO: 640 is the amino acid sequence of hEphA3 5′ UTR alternative reading frame rf0 peptide A.

[0318] SEQ ID NO: 641 is the amino acid sequence of hEphA3 5′ UTR alternative reading frame rf0 peptide B.

[0319] SEQ ID NO: 642 is the amino acid sequence of hEphA3 5′ UTR alternative reading frame rf1 peptides.

[0320] SEQ ID NO: 643 is the amino acid sequence of hEphA3 5′ UTR alternative reading frame rf1 peptide A.

[0321] SEQ ID NO: 644 is the amino acid sequence of hEphA3 5′ UTR alternative reading frame rf2 peptides.

[0322] SEQ ID NO: 645 is the nucleotide sequence of hHER2 (Genbank Accession No. M_{—}1 1730) 5′ UTR.

[0323] SEQ ID NO: 646 is the amino acid sequence of hHER2 5′ UTR alternative reading frame rf0 peptides.

[0324] SEQ ID NO: 647 is the amino acid sequence of hHER2 5′ UTR alternative reading frame rf1 peptides.

[0325] SEQ ID NO: 648 is the amino acid sequence of hHER2 5′ UTR alternative reading frame rf1 peptide A.

[0326] SEQ ID NO: 649 is the amino acid sequence of hHER2 5′ UTR alternative reading frame rf2 peptides.

[0327] SEQ ID NO: 650 is the nucleotide sequence of hMDR1 (Genbank Accession No. M_{—}14758) 5′ UTR.

[0328] SEQ ID NO: 651 is the amino acid sequence of hMDR15′ UTR alternative reading frame rf0 peptides.

[0329] SEQ ID NO: 652 is the amino acid sequence of hMDR15′ UTR alternative reading frame rf0 peptide A.

[0330] SEQ ID NO: 653 is the amino acid sequence of hMDR15′ UTR alternative reading frame rf0 peptide B.

[0331] SEQ ID NO: 654 is the amino acid sequence of hMDR15′ UTR alternative reading frame rf0 peptide C.

[0332] SEQ ID NO: 655 is the amino acid sequence of hMDR15′ UTR alternative reading frame rf0 peptide D.

[0333] SEQ ID NO: 656 is the amino acid sequence of hMDR15′ UTR alternative reading frame rf0 peptide E.

[0334] SEQ ID NO: 657 is the amino acid sequence of hMDR1 5′ UTR alternative reading frame rf1 peptides.

[0335] SEQ ID NO: 658 is the amino acid sequence of hMDR1 5′ UTR alternative reading frame rf1 peptide A.

[0336] SEQ ID NO: 659 is the amino acid sequence of hMDR15′ UTR alternative reading frame rf1 peptide B.

[0337] SEQ ID NO: 660 is the amino acid sequence of hMDR15′ UTR alternative reading frame rf1 peptide C.

[0338] SEQ ID NO: 661 is the amino acid sequence of hMDR15′ UTR alternative reading frame rf1 peptide D.

[0339] SEQ ID NO: 662 is the amino acid sequence of hMDR1 5′ UTR alternative reading frame rf1 peptide E.

[0340] SEQ ID NO: 663 is the amino acid sequence of hHER2 5′ UTR alternative reading frame rf2 peptides.

[0341] SEQ ID NO: 664 is the amino acid sequence of hHER2 5′ UTR alternative reading frame rf2 peptide A.

[0342] SEQ ID NO: 665 is the amino acid sequence of hHER2 5′ UTR alternative reading frame rf2 peptide B.

[0343] SEQ ID NO: 666 is the amino acid sequence of hHER2 5′ UTR alternative reading frame rf2 peptide C.

[0344] SEQ ID NO: 667 is the nucleotide sequence of hP53 (Genbank Accession No. M_{—}14495) 5′ UTR.

[0345] SEQ ID NO: 668 is the amino acid sequence of hP53 5′ UTR alternative reading frame rf0 peptides.

[0346] SEQ ID NO: 669 is the amino acid sequence of hP53 5′ UTR alternative reading frame rf0 peptide A.

[0347] SEQ ID NO: 670 is the amino acid sequence of hP53 5′ UTR alternative reading frame rf1 peptides.

[0348] SEQ ID NO: 671 is the amino acid sequence of hP53 5′ UTR alternative reading frame rf2 peptides.

[0349] SEQ ID NO: 672 is the amino acid sequence of hP53 5′ UTR alternative reading frame rf2 peptide A.

[0350] SEQ ID NO: 673 is the amino acid sequence of hP53 5′ UTR alternative reading frame rf2 peptide B.

[0351] SEQ ID NO: 674 is the nucleotide sequence of hPRAME (Genbank Accession No. U65011) 5′ UTR.

[0352] SEQ ID NO: 675 is the amino acid sequence of hPRAME 5′ UTR alternative reading frame rf0 peptides.

[0353] SEQ ID NO: 676 is the amino acid sequence of hPRAME 5′ UTR alternative reading frame rf0 peptide A.

[0354] SEQ ID NO: 677 is the amino acid sequence of hPRAME 5′ UTR alternative reading frame rf0 peptide B.

[0355] SEQ ID NO: 678 is the amino acid sequence of hPRAME 5′ UTR alternative reading frame rf0 peptide C.

[0356] SEQ ID NO: 679 is the amino acid sequence of hPRAME 5′ UTR alternative reading frame rf1 peptides.

[0357] SEQ ID NO: 680 is the amino acid sequence of hPRAME 5′ UTR alternative reading frame rf1 peptide A.

[0358] SEQ ID NO: 681 is the amino acid sequence of hPRAME 5′ UTR alternative reading frame rf1 peptide B.

[0359] SEQ ID NO: 682 is the amino acid sequence of hPRAME 5′ UTR alternative reading frame rf2 peptides.

[0360] SEQ ID NO: 683 is the amino acid sequence of hPRAME 5′ UTR alternative reading frame rf2 peptide A.

[0361] SEQ ID NO: 684 is the amino acid sequence of hPRAME 5′ UTR alternative reading frame rf2 peptide B.

[0362] SEQ ID NO: 685 is the amino acid sequence of hPRAME 5′ UTR alternative reading frame rf2 peptide C.

[0363] SEQ ID NO: 686 is the nucleotide sequence of hPSMA (Genbank Accession No. NM004476) 5′ UTR.

[0364] SEQ ID NO: 687 is the amino acid sequence of hPSMA 5′ UTR alternative reading frame rf0 peptides.

[0365] SEQ ID NO: 688 is the amino acid sequence of hPSMA 5′ UTR alternative reading frame rf0 peptide A.

[0366] SEQ ID NO: 689 is the amino acid sequence of hPSMA 5′ UTR alternative reading frame rf0 peptide B.

[0367] SEQ ID NO: 690 is the amino acid sequence of hPSMA 5′ UTR alternative reading frame rf1 peptides.

[0368] SEQ ID NO: 691 is the amino acid sequence of hPSMA 5′ UTR alternative reading frame rf1 peptide A.

[0369] SEQ ID NO: 692 is the amino acid sequence of hPSMA 5′ UTR alternative reading frame rf1 peptide B.

[0370] SEQ ID NO: 693 is the amino acid sequence of hPSMA 5′ UTR alternative reading frame rf2 peptides.

[0371] SEQ ID NO: 694 is the amino acid sequence of hPSMA 5′ UTR alternative reading frame rf2 peptide A.

[0372] SEQ ID NO: 695 is the amino acid sequence of hPSMA 5′ UTR alternative reading frame rf2 peptide B.

[0373] SEQ ID NO: 696 is the nucleotide sequence of hRCAS1 (Genbank Accession No. AF006265) 5′ UTR.

[0374] SEQ ID NO: 697 is the amino acid sequence of hRCAS1 5′ UTR alternative reading frame rf0 peptides.

[0375] SEQ ID NO: 698 is the amino acid sequence of hRCAS1 5′ UTR alternative reading frame rf0 peptide A.

[0376] SEQ ID NO: 699 is the amino acid sequence of hRCAS1 5′ UTR alternative reading frame rf0 peptide B.

[0377] SEQ ID NO: 700 is the amino acid sequence of hRCAS1 5′ UTR alternative reading frame rf0 peptide C.

[0378] SEQ ID NO: 701 is the amino acid sequence of hRCAS1 5′ UTR alternative reading frame rf1 peptides.

[0379] SEQ ID NO: 702 is the amino acid sequence of hRCAS1 5′ UTR alternative reading frame rf1 peptide A.

[0380] SEQ ID NO: 703 is the amino acid sequence of hRCAS1 5′ UTR alternative reading frame rf1 peptide B.

[0381] SEQ ID NO: 704 is the amino acid sequence of hRCAS1 5′ UTR alternative reading frame rf1 peptide C.

[0382] SEQ ID NO: 705 is the amino acid sequence of hRCAS1 5′ UTR alternative reading frame rf2 peptides.

[0383] SEQ ID NO: 706 is the amino acid sequence of hRCAS1 5′ UTR alternative reading frame rf2 peptide A.

[0384] SEQ ID NO: 707 is the amino acid sequence of hRCAS1 5′ UTR alternative reading frame rf2 peptide B.

[0385] SEQ ID NO: 708 is the nucleotide sequence of hSGA-1M (Genbank Accession No. AY192728) 5′ UTR.

[0386] SEQ ID NO: 709 is the amino acid sequence of hSGA-1M 5′ UTR alternative reading frame rf0 peptides.

[0387] SEQ ID NO: 710 is the amino acid sequence of hSGA-1M 5′ UTR alternative reading frame rf0 peptide A.

[0388] SEQ ID NO: 711 is the amino acid sequence of hSGA-1M 5′ UTR alternative reading frame rf0 peptide B.

[0389] SEQ ID NO: 712 is the amino acid sequence of hSGA-1M 5′ UTR alternative reading frame rf1 peptide.

[0390] SEQ ID NO: 713 is the amino acid sequence of hSGA-1M 5′ UTR alternative reading frame rf2 peptide.

[0391] SEQ ID NO: 714 is the nucleotide sequence of hTERT (Genbank Accession No. NM_{—}003219) 5′ UTR.

[0392] SEQ ID NO: 715 is the amino acid sequence of hTERT 5′ UTR alternative reading frame rf0 peptide.

[0393] SEQ ID NO: 716 is the amino acid sequence of hTERT 5′ UTR alternative reading frame rf1 peptide.

[0394] SEQ ID NO: 717 is the amino acid sequence of hTERT 5′ UTR alternative reading frame rf2 peptide.

[0395] SEQ ID NO: 718 is the nucleotide sequence of hTRP-P8 (Genbank Accession No. NM_{—}024080) 5′ UTR.

[0396] SEQ ID NO: 719 is the amino acid sequence of hTRP-P8 5′ UTR alternative reading frame rf0 peptides.

[0397] SEQ ID NO: 720 is the amino acid sequence of hTRP-P8 5′ UTR alternative reading frame rf0 peptide A.

[0398] SEQ ID NO: 721 is the amino acid sequence of hTRP-P8 5′ UTR alternative reading frame rf1 peptides.

[0399] SEQ ID NO: 722 is the amino acid sequence of hTRP-P8 5′ UTR alternative reading frame rf2 peptide.

[0400] SEQ ID NO: 723 is the nucleotide sequence of hWTI (Genbank Accession No. NM_{—}000378) 5′ UTR.

[0401] SEQ ID NO: 724 is the amino acid sequence of hWTI 5′ UTR alternative reading frame rf0 peptide.

[0402] SEQ ID NO: 725 is the amino acid sequence of hWTI 5′ UTR alternative reading frame rf1 peptides.

[0403] SEQ ID NO: 726 is the amino acid sequence of hWTI 5′ UTR alternative reading frame rf1 peptide A.

[0404] SEQ ID NO: 727 is the amino acid sequence of hWTI 5′ UTR alternative reading frame rf1 peptide B.

[0405] SEQ ID NO: 728 is the amino acid sequence of hWTI 5′ UTR alternative reading frame rf2 peptides.

[0406] SEQ ID NO: 729 is the amino acid sequence of hWTI 5′ UTR alternative reading frame rf2 peptide A.

[0407] SEQ ID NO: 730 is the amino acid sequence of hWTI 5′ UTR alternative reading frame rf2 peptide B.

[0408] SEQ ID NO: 731 is the nucleotide sequence of human adenovirus 2 (AD2; Genbank Accession No. BK000407) available as ATCC No. VR-846.

[0409] SEQ ID NO: 732 is the nucleotide sequence of human adenovirus 5 (AD5; Genbank Accession No. BK000408) available as ATCC No. VR-5.

[0410] SEQ ID NO: 733 is the nucleotide sequence of human adenovirus 11 (AD11; Genbank Accession No. BK001453) available as ATCC No. VR-12.

### DETAILED DESCRIPTION OF THE INVENTION

[0411] The present invention is based upon the observation that alternative reading frame (ARF) polypeptides resulting from the aberrant expression of proteins are capable of stimulating CD8⁺ cytotoxic T-cell immune responses. When administered in vivo to an animal, ARF polypeptides or antigen presenting cells (APCs) primed with such ARF polypeptides are effective in reducing the growth of tumor cells and, accordingly, in increasing survival of the animal.

[0412] The practice of the present invention will employ, unless indicated specifically to the contrary, conventional methods of virology, immunology, microbiology, molecular biology and recombinant DNA techniques within the skill of the art, many of which are described below for the purpose of illustration. Such techniques are explained fully in the literature. See, e.g., Sambrook, et al., “Molecular Cloning: A Laboratory Manual” (2nd Edition, 1989); “DNA Cloning: A Practical Approach, vol. I & II” (D. Glover, ed.); “Oligonucleotide Synthesis” (N. Gait, ed., 1984); “Nucleic Acid Hybridization” (B. Hames & S. Higgins, eds., 1985); “Transcription and Translation” (B. Hames & S. Higgins, eds., 1984); “Animal Cell Culture” (R. Freshney, ed., 1986); and Perbal, “A Practical Guide to Molecular Cloning” (1984). All publications, patents and patent applications cited herein, whether supra or infra, are hereby incorporated by reference in their entirety.

[0413] As used herein, the singular forms “a,” “an” and “the” include plural references unless the content clearly dictates otherwise.

[0414] As used herein, the term “polynucleotide” is used generically to include all polymers of two or more nucleotides and is meant to include “mRNA,” “cDNA” and “DNA.”

[0415] As used herein, the term “junk DNA” refers to the majority of the genome that is represented by repetitive sequences (about 50%) and noncoding unique sequences. The term “junk DNA” is used herein in a manner consistent with conventional usage in the art and as defined within the following publications which are incorporated herein by reference in their entirety: Zuckerkandl, Gene 205(1-2):323-43 (1997); Makalowski, Acta Biochim. Pol. 48(3):587-98 (2001); and Elder et al., Q. Rev. Biol. 70(3):297-320 (1995).

[0416] As used herein, the term “polypeptide” is used generically to include all polymers of two or more amino acids and is meant to include proteins.

[0417] In general, ARF polypeptides (including ARF polypeptide fusion proteins and conjugates) and polynucleotides as described herein are isolated. An “isolated” polypeptide or polynucleotide is one that is removed from its original environment. For example, an ARF polypeptide, fusion protein, or conjugate is “isolated” if it is separated from some or all of the coexisting materials in the natural system. Preferably, such polypeptides are at least about 90% pure, more preferably at least about 95% pure and most preferably at least about 99% pure. A polynucleotide is considered to be isolated if, for example, it is cloned into a vector that is not a part of the natural environment.

[0418] Alternative Reading Frame Polypeptides

[0419] The present invention provides alternative reading frame (ARF) polypeptides derived from the aberrant translation of mRNA or infectious disease antigens. The term “alternative reading frame polypeptide” includes translation products resulting from initiation of translation at a site that is distinct from the site of normal translation initiation. As used herein, two of the possible alternative reading frames are referred to as rf1 and rf2 while the normal reading frame is termed rf0. Thus, rf1 defines the reading frame resulting in translation initiating in the frame one nucleotide 3′ to the rf0 frame defined by the normal AUG initiation site and rf2 defines the reading frame resulting in translation that initiates in the frame two nucleotides 3′ to the rf0 frame defined by the normal AUG initiation site.

[0420] As discussed above, ARF polypeptides are produced in vivo as a consequence of errors inherent in protein synthesis. Without wishing to being limited to any specific mechanism of action, ARF polypeptides according to the present invention correspond to polypeptides generated by in vivo translational errors in either the rf1 or rf2 reading frames including: (1) synthesis of polypeptides in reading frames rf0, rf1, and rf2 generated through AUG translation initiation of open reading frames in 5′ and 3′ untranslated regions (UTRs); (2) frame-shifting of the initiation complex at the normal rf0 AUG codon one base (rf1) or two bases (rf2) forward or one base (rf2) or two bases (rf1) backward; (3) formation of an initiation complex at an AUG codon that is downstream (i.e. 3′ to) the normal initiation AUG codon; (4) formation of an initiation complex at an internal ribosome entry sites (IRES) located 3′ to the site of normal ribosomal entry; (5) frame shifting of the ribosome through random and programmed frame-shifts from rf0 to rf1 or rf2 reading frames; (6) formation of initiation complexes at rf1 or rf2 codons other than AUG, such as, for example, ACG or CTG; (7) ribosomal skipping of mRNA segments; (8) ribosomal suppression of termination codons and subsequent translational readthrough; (9) synthesis of polypeptides in reading frames rf0, rf1, and rf2 generated through AUG translation initiation of open reading frames (ORFs) in junk DNA; (10) synthesis of polypeptides in reading frames 3, 4, and 5 (i.e. rf3, rf4, and rf5) resulting from the translation of antisense strands of genes that are expressed through transcription from cryptic promoters; and (11) alternative mRNA splice variants wherein an intron encoded polypeptide reads into exon reading frames rf1 or rf2 of a normal gene product.

[0421] The present invention contemplates ARF polypeptides derived from any polynucleotide sequence that is normally expressed in a mammalian cell, preferably a human cell, wherein the ARF polypeptide is capable of eliciting an immune response, most commonly a CD8⁺ cytotoxic T-cell (CTL) response. Within preferred embodiments, the expression of ARF polypeptides of the present invention is modulated by the transformation of normal tissue into diseased state (carcinomas), usually involving the over-expression of ARF polypeptides.

[0422] As exemplified herein, antigens include, but are not limited to, the human tyrosine kinase receptor (hHER-2; SEQ ID NO: 2; Genbank Accession No. M11730); the human telomerase reverse transcriptase (hTERT; SEQ ID NO: 4; Genbank Accession No. NM_{—}003219); the mouse telomerase reverse transcriptase (mTERT; SEQ ID NO: 6; Genbank Accession No. NM_{—}009354); the human transient receptor potential cation channel 8 (hTrpP8; SEQ ID NO: 8; Genbank Accession No. NM 024080); one or more of the human prostatic acid phosphatase variants (hPAP; SEQ ID NOs: 10 and 12; Genbank Accession Nos. M34840 and X53605, respectively), the human carbonic anhydrase IX (hCA9; SEQ ID NO: 295; Genbank Accession No. NM_{—}001216); the human carcinoembryonic antigen (hCEA; SEQ ID NO: 302; Genbank Accession No. M17303); human prostate-specific membrane antigen (hPSMA; SEQ ID NO: 345; Genbank Accession No. NM_{—}004476); human prostate-specific antigen (hPSA; SEQ ID NO: 369; Genbank Accession No. M26663); human p53 cellular tumor antigen (hp53; SEQ ID NO: 381; Genbank Accession No. M14695); human P-glycoprotein (hPGY1; SEQ ID NO: 392; Genbank Accession No. M14758); human alpha-fetoprotein (hAFP; SEQ ID NO: 424; Genbank Accession No. NM_{—}001134); human mucin precursor (hMUC1; SEQ ID NO: 441; Genbank Accession No. AF125525); human preferentially expressed antigen of melanoma (hPRAME; SEQ ID NO: 452; Genbank Accession No. U65011); human ephrin receptor (hEPHA3; SEQ ID NO: 468; Genbank Accession No. AF213459); human peptidyl-prolyl isomerase and essential mitotic regulator (hPIN1; SEQ ID NO: 496; Genbank Accession No. U49070); human BASE (hBASE; SEQ ID NO: 504; Genbank Accession No. AY180924); human prostate stem cell antigen (hPSCA; SEQ ID NO: 515; Genbank Accession No. AF043498); human SURVIVIN (hSURVIVIN; SEQ ID NO: 549; Genbank Accession No. AF077350); human WTI (hWTI; SEQ ID NO: 557; Genbank Accession No. NM_{—}000378); human SGA-M1 (hSGA-M1; SEQ ID NO: 566; Genbank Accession No. AY192728); human RCAS1 (hRCAS1; SEQ ID NO: 579; Genbank Accession No. AF006265); and human CYP1B1 (hCYP1B1; SEQ ID NO: 592; Genbank Accession No. NM_{—}000104).

[0423] AUG initiated rf1 and rf2 open reading frames encoding polypeptides of nine or more amino-acids (referred to herein as ARF polypeptides) were identified by analysis of cDNAs encoding the following 22 antigens: human tyrosine kinase receptor (hHER-2), mouse telomerase reverse transcriptase (mTERT), human transient receptor potential cation channel 8 (hTrpP8), human prostatic acid phosphatase (hPAP), human carbonic anhydrase IX (hCA9), and human carcinoembryonic antigen (hCEA), human prostate-specific membrane antigen (hPSMA); human prostate-specific antigen (hPSA); human p53 cellular tumor antigen (hp53); human P-glycoprotein (hPGY1); human alpha-fetoprotein (hAFP); human mucin precursor (hMUC1); human preferentially expressed antigen of melanoma (hPRAME); human ephrin receptor (hEPHA3); human peptidyl-prolyl isomerase and essential mitotic regulator (hPIN1); human BASE (hBASE); human prostate stem cell antigen (hPSCA); human SURVIVIN (hSURVIVIN); human WTI (hWTI); human SGA-M1 (hSGA-M1); human RCAS1 (hRCAS1); and human CYP1B1 (hCYP1B1). Each of these ARF polypeptides initiate at an AUG codon, other than the normal AUG initiation codon, at a position 3′ to the site of normal translation initiation.

[0424] In addition, two open reading frames, those that correspond to nucleotide position 2 and nucleotide position 3 (i.e. reading frames rf1 and rf2, respectively) of the initiating AUG of hHER-2, mTERT, hTrpP8, hPAP, hCA9, hCEA, hPSMA, hPSA, hp53, hPGY1, hAFP, hMUC1, hPRAME, hEPHA3, hPIN1, hBASE, hPSCA, hSURVIVIN; hWTI; hSGA-M1; hRCAS1; and hCYP1B1 were also identified. These ARF polypeptides correspond to translational initiation adjacent to the normal AUG initiation codon, but result from errors in translation initiation whereby ARF polypeptides are produced in either reading frame rf1 or rf2 rather than in the reading frame, rf0, which reading frame corresponds to translation initiation at the normal AUG initiation codon.

[0425] Exemplary ARF polypeptides derived from the polynucleotide encoding hHER-2, SEQ ID NO: 2, are disclosed in Example 2, Table 1, and presented herein as SEQ ID NOs: 15-32. SEQ ID NOs: 15 and 16 depict rf1 and rf2 ARF polypeptides, respectively, encoded by reading frames adjacent to the normal AUG initiation codon while SEQ ID NOs: 17-32 depict rf1 and rf2 ARF polypeptides initiating at AUG codons 3′ to the normal AUG initiation codon.

[0426] Exemplary ARF polypeptides derived from a polynucleotide encoding hTERT, SEQ ID NO: 4, are disclosed in Example 3, Table 3, and presented herein as SEQ ID NOs: 194-202. SEQ ID NOs: 194 and 195 depict rf1 and rf2 ARF polypeptides, respectively, encoded by reading frames adjacent to the normal AUG initiation codon while SEQ ID NOs: 196-202 depict rf1 and rf2 ARF polypeptides initiating at AUG codons 3′ to the normal AUG initiation codon.

[0427] Exemplary ARF polypeptides derived from the polynucleotide encoding mTERT, SEQ ID NO: 6, are disclosed in Example 3, Table 5, and presented herein as SEQ ID NOs: 96-111. SEQ ID NOs: 96 and 97 depict rf1 and rf2 ARF polypeptides, respectively, encoded by reading frames adjacent to the normal AUG initiation codon while SEQ ID NOs: 98-111 depict rf1 and rf2 ARF polypeptides initiating at AUG codons 3′ to the normal AUG initiation codon.

[0428] Exemplary ARF polypeptides derived from a polynucleotide encoding hTrpP8, SEQ ID NO: 8, are disclosed in Example 4, Table 6, and presented herein as SEQ ID NOs: 203-219. SEQ ID NOs: 203 and 204 depict rf1 and rf2 ARF polypeptides, respectively, encoded by reading frames adjacent to the normal AUG initiation codon while SEQ ID NOs: 205-219 depict rf1 and rf2 ARF polypeptides initiating at AUG codons 3′ to the normal AUG initiation codon.

[0429] Exemplary ARF polypeptides derived from a polynucleotide encoding a hPAP variant, SEQ ID NO: 10, are disclosed in Example 5, Table 8, and presented herein as SEQ ID NOs: 248-256. SEQ ID NOs: 248 and 249 depict rf1 and rf2 ARF polypeptides, respectively, encoded by reading frames adjacent to the normal AUG initiation codon while SEQ ID NOs: 250-256 depict rf1 and rf2 ARF polypeptides initiating at AUG codons 3′ to the normal AUG initiation codon.

[0430] Exemplary ARF polypeptides derived from a polynucleotide encoding an alternative hPAP variant, SEQ ID NO: 12, are disclosed in Example 5, Table 10, and presented herein as SEQ ID NOs: 280-289. SEQ ID NOs: 280 and 281 depict rf1 and rf2 ARF polypeptides, respectively, encoded by reading frames adjacent to the normal AUG initiation codon while SEQ ID NOs: 282-289 depict rf1 and rf2 ARF polypeptides initiating at AUG codons 3′ to the normal AUG initiation codon.

[0431] Exemplary ARF polypeptides derived from a polynucleotide encoding h CA9, SEQ ID NO: 295, are disclosed in Example 6, Table 11, and presented herein as SEQ ID NOs: 296-300. SEQ ID NOs: 296 and 297 depict rf1 and rf2 ARF polypeptides, respectively, encoded by reading frames adjacent to the normal AUG initiation codon while SEQ ID NOs: 298-300 depict rf1 and rf2 ARF polypeptides initiating at AUG codons 3′ to the normal AUG initiation codon.

[0432] Exemplary ARF polypeptides derived from a polynucleotide encoding hCEA, SEQ ID NO: 302, are disclosed in Example 7, Table 12, and presented herein as SEQ ID NOs: 303-319. SEQ ID NOs: 303 and 304 depict rf1 and rf2 ARF polypeptides, respectively, encoded by reading frames adjacent to the normal AUG initiation codon while SEQ ID NOs: 305-319 depict rf1 and rf2 ARF polypeptides initiating at AUG codons 3′ to the normal AUG initiation codon.

[0433] Exemplary ARF polypeptides derived from a polynucleotide encoding hPSMA, SEQ ID NO: 345, are disclosed in Example 8, Table 13, and presented herein as SEQ ID NOs: 350-367. SEQ ID NOs: 350 and 351 depict rf1 and rf2 ARF polypeptides, respectively, encoded by reading frames adjacent to the normal AUG initiation codon while SEQ ID NOs: 352-367 depict rf1 and rf2 ARF polypeptides initiating at AUG codons 3′ to the normal AUG initiation codon.

[0434] Exemplary ARF polypeptides derived from a polynucleotide encoding hPSA, SEQ ID NO: 369, are disclosed in Example 9, Table 14, and presented herein as SEQ ID NOs: 374-379. SEQ ID NOs: 374 and 375 depict rf1 and rf2 ARF polypeptides, respectively, encoded by reading frames adjacent to the normal AUG initiation codon while SEQ ID NOs: 376-379 depict rf1 and rf2 ARF polypeptides initiating at AUG codons 3′ to the normal AUG initiation codon.

[0435] Exemplary ARF polypeptides derived from a polynucleotide encoding hp53, SEQ ID NO: 381, are disclosed in Example 10, Table 15, and presented herein as SEQ ID NOs: 386-390. SEQ ID NO: 386 depicts an rf1 ARF polypeptides encoded by a reading frame adjacent to the normal AUG initiation codon while SEQ ID NOs: 387-390 depict rf1 and rf2 ARF polypeptides initiating at AUG codons 3′ to the normal AUG initiation codon.

[0436] Exemplary ARF polypeptides derived from a polynucleotide encoding hPGY1, SEQ ID NO: 392, are disclosed in Example 11, Table 16, and presented herein as SEQ ID NOs: 397-422. SEQ ID NO: 397 depicts an rf1 ARF polypeptide encoded by a reading frame adjacent to the normal AUG initiation codon while SEQ ID NOs: 398-422 depict rf1 and rf2 ARF polypeptides initiating at AUG codons 3′ to the normal AUG initiation codon.

[0437] Exemplary ARF polypeptides derived from a polynucleotide encoding hAFP, SEQ ID NO: 424, are disclosed in Example 12, Table 17, and presented herein as SEQ ID NOs: 429-439. SEQ ID NOs: 446 and 447 depict rf1 and rf2 ARF polypeptides, respectively, encoded by reading frames adjacent to the normal AUG initiation codon while SEQ ID NOs: 448-450 depict rf1 and rf2 ARF polypeptides initiating at AUG codons 3′ to the normal AUG initiation codon.

[0438] Exemplary ARF polypeptides derived from a polynucleotide encoding hPRAME, SEQ ID NO: 452, are disclosed in Example 14, Table 19, and presented herein as SEQ ID NOs: 457-466. SEQ ID NOs: 457 and 458 depict rf1 and rf2 ARF polypeptides, respectively, encoded by reading frames adjacent to the normal AUG initiation codon while SEQ ID NOs: 459-466 depict rf1 and rf2 ARF polypeptides initiating at AUG codons 3′ to the normal AUG initiation codon.

[0439] Exemplary ARF polypeptides derived from a polynucleotide encoding hEPHA3, SEQ ID NO: 468, are disclosed in Example 15, Table 20, and presented herein as SEQ ID NOs: 473-494. SEQ ID NOs: 473 and 474 depict rf1 and rf2 ARF polypeptides, respectively, encoded by reading frames adjacent to the normal AUG initiation codon while SEQ ID NOs: 475-494 depict rf1 and rf2 ARF polypeptides initiating at AUG codons 3′ to the normal AUG initiation codon.

[0440] Exemplary ARF polypeptides derived from a polynucleotide encoding hPIN1, SEQ ID NO: 496, are disclosed in Example 16, Table 21, and presented herein as SEQ ID NOs: 501-502 which depict ARF polypeptides encoded by reading frames adjacent to the normal AUG initiation codon.

[0441] Exemplary ARF polypeptides derived from a polynucleotide encoding hBASE, SEQ ID NO: 504, are disclosed in Example 17, Table 22, and presented herein as SEQ ID NOs: 509-513. SEQ ID NO: 509 depicts an rf2 ARF polypeptide encoded by a reading frame adjacent to the normal AUG initiation codon while SEQ ID NOs: 510-513 depict rf1 and rf2 ARF polypeptides initiating at AUG codons 3′ to the normal AUG initiation codon.

[0442] Exemplary ARF polypeptides derived from a polynucleotide encoding hPSCA, SEQ ID NO: 515, are disclosed in Example 18, Table 23, and presented herein as SEQ ID NOs: 520-521. SEQ ID NO: 520 depicts an rf2 ARF polypeptide encoded by a reading frame adjacent to the normal AUG initiation codon while SEQ ID NO: 521 depicts an ARF polypeptide initiating at AUG codons 3′ to the normal AUG initiation codon.

[0443] Exemplary ARF polypeptides derived from a polynucleotide encoding hSURVIVIN, SEQ ID NO: 549, are disclosed in Example 19, Table 24, and presented herein as SEQ ID NOs: 551-553 and 555. SEQ ID NOs: 551 and 553 depict rf1 ARF polypeptides and SEQ ID NOs: 552 and 555 depict rf2 ARF polypeptides encoded by a reading frame adjacent to the normal AUG initiation codon.

[0444] Exemplary ARF polypeptides derived from a polynucleotide encoding h WTI, SEQ ID NO: 557, are disclosed in Example 20, Table 25, and presented herein as SEQ ID NOs: 559-562 and 564. SEQ ID NOs: 560 and 562 depict rf1 ARF polypeptides and SEQ ID NOs: 559, 561, and 564 depict rf2 ARF polypeptides encoded by a reading frame adjacent to the normal AUG initiation codon.

[0445] Exemplary ARF polypeptides derived from a polynucleotide encoding hSGA-M1, SEQ ID NO: 566, are disclosed in Example 21, Table 26, and presented herein as SEQ ID NOs: 568-575 and 577. SEQ ID NOs: 568, 570-572, and 575 depict rf1 ARF polypeptides and SEQ ID NOs: 569, 573, 574, and 577 depict rf2 ARF polypeptides encoded by a reading frame adjacent to the normal AUG initiation codon.

[0446] Exemplary ARF polypeptides derived from a polynucleotide encoding hRCAS1, SEQ ID NO: 579, are disclosed in Example 22, Table 27, and presented herein as SEQ ID NOs: 581-588 and 590. SEQ ID NOs: 581, 583-585, 587, and 588 depict rf1 ARF and SEQ ID NOs: 582, 586, and 590 depict rf2 ARF polypeptides encoded by a reading frame adjacent to the normal AUG initiation codon.

[0447] Exemplary ARF polypeptides derived from a polynucleotide encoding hCYP1B1, SEQ ID NO: 592, are disclosed in Example 23, Table 28, and presented herein as SEQ ID NOs: 594-599. SEQ ID NOs: 594-597, and 599 depict rf1 ARF and SEQ ID NOs: 598 and 601 depict rf2 ARF polypeptides encoded by a reading frame adjacent to the normal AUG initiation codon.

[0448] Pools of overlapping peptides corresponding to rf1 and rf2 ARF polypeptides were synthesized and assayed for capacity to elicit an immune response. As disclosed within the Examples herein, polypeptide pools generated a protective dendritic cell (DC)-induced, cytotoxic T-cell mediated immune response against tumors stably expressing either the hHER-2, the mTERT, the hTrpP8 or the hPAP tumor antigen. For example, peptide pools containing peptides corresponding to the two ARFs that begin in the rf1 and rf2 positions of the rf0 AUG suppressed the in vivo growth of HER-2 expressing autologous tumors in mice.

[0449] The present invention further contemplates additional ARF polypeptides corresponding to aberrant translation of a polynucleotide of interest. Regardless of the precise polynucleotide from which the ARF polypeptides are derived, it is preferred that ARF polypeptides comprise at least 9 amino acids in length. Certain embodiments provide ARF polypeptides that are at least 10, 11, 12, 13, 14, or 15 amino acids in length. Still further embodiments provide ARF polypeptides that are at least 16, 17, 18, 19, or 20 amino acids in length. Alternative embodiments provide ARF polypeptides that are at least 25, 30, 35, 40, 45, or 50 amino acids in length or that are at least 75, 100, 150, or 200 amino acids in length.

[0450] Within other embodiments of the present invention are “full-length” rf1 and rf2 sequences of hCA9, hCEA, hHER2, hPAP, hTERT, hTrpP8, hPSMA, hPSA, hp53, hPGY1, hAFP, hMUC1, hPRAME, hEPHA3, hPIN1, hBASE, hPSCA, hSURVIVIN, hWTI, hSGA-M1, hRCAS1, and hCYP1B1 derived by deleting stop codons (TGA, TAA, and TAG) and by deleting residues between stop codons that encode less than 9 consecutive amino acid residues. Exemplary full-length rf1 and rf2 amino acid sequences of hCA9, hCEA, hHER2, hPAP, hTERT, hTrpP8, hPSMA, hPSA, hp53, hPGY1, hAFP, hMUC1, hPRAME, hEPHA3, hPIN1, hBASE, hPSCA, hSURVIVIN, hWTI, hSGA-M1, hRCAS1, and hCYP1B1 are presented herein as SEQ ID NOs: 320, 322, 324, 326, 328, 330, 332, 334, 336, 338, 340, 342, 346, 348, 370, 372, 382, 384, 393, 395, 425, 427, 442, 444, 453, 455, 469, 471, 497, 499, 505, 507, 516, 518, 554, 556, 562, 564, 575, 577, 588, 590, 599, and 601, respectively and are encoded by the polynucleotides of SEQ ID NOs: 321, 323, 325, 327, 329, 331, 333, 335, 337, 339, 341, 343, 347, 349, 371, 373, 383, 385, 394, 396, 426, 428, 443, 445, 454, 456, 470, 472, 498, 500, 506, 508, 517, 519, 555, 557, 563, 565, 576, 578, 589, 591, 600, and 602 respectively.

[0451] Within still further embodiments, the present invention provides alternative reading frame polypeptides encoded by the 5′ untranslated regions (UTRs) of the tumor associated antigens (TAAs) presented herein. As used herein, the term 5′ untranslated region or 5′-UTR refers to the nucleotide sequence 5′ to the AUG codon that is the site of normal translation initiation and 3′ to the mRNA cap. Within this region, alternative reading frame polypeptides may be expressed in the rf0, rf1, or rf2 reading frames relative to the start AUG codon. In general any out-of-frame AUG codon in the 5′UTR is a potential source of Arf peptides as long as it codes for more than 8 residues. This can be further expanded to non-AUG initiation codons in the 5′UTR as described above. 5′ UTR alternative reading frames were identified in the tumor associated antigens presented herein and are disclosed in table form in Example 24 (Table 29). In general, sequences downstream of the mRNA 5′ cap that encode open reading frames encoding 9 or more residues in all three (rf0, rf1, and rf2) reading frames. The rf0 reading frame is included within the context of 5′ UTR because short peptides can be made in this reading frame that are not part of the naturally encoded protein. Because the ribosomes are primed to initiate translation, alternative AUG-like codons can serve to initiate translation—a 5′ AUG initiation codon is not required.

[0452] Polypeptides according to the present invention may be synthesized by conventional polypeptide synthesis methodology. For example, such polypeptides may be synthesized using any of the commercially available solid-phase techniques, such as the Merrifield solid-phase synthesis method, where amino acids are sequentially added to a growing amino acid chain. See Merrifield, J. Am. Chem. Soc. 85:2149-2146 (1963). Equipment for automated synthesis of polypeptides is commercially available from suppliers such as Perkin Elmer/Applied BioSystems Division (Foster City, Calif.), and may be operated according to the manufacturer's instructions.

[0453] Alternatively, conventional molecular biology and recombinant DNA methodology may be employed to generate polynucleotides encoding ARF polypeptides. Such methodology are explained fully in the literature. See, e.g., Sambrook et al., Molecular Cloning: A Laboratory Manual (2nd Edition, 1989); Maniatis et al., Molecular Cloning: A Laboratory Manual (1982); DNA Cloning: A Practical Approach, vol. I & II (D. Glover, ed.); Oligonucleotide Synthesis (N. Gait, ed., 1984); Nucleic Acid Hybridization (B. Hames & S. Higgins, eds., 1985); Transcription and Translation (B. Hames & S. Higgins, e ds., 1984); Animal Cell Culture (R. Freshney, ed., 1986); Perbal, A Practical Guide to Molecular Cloning (1984). Each of these publications is incorporated by reference in their entirety.

[0454] Briefly, DNA sequences encoding ARF polypeptides may be ligated into an appropriate expression vector wherein the expression vector comprises a transcriptional promoter in operable linkage to the polynucleotide encoding the ARF polypeptide and transcription termination signals 3′ to the polynucleotide encoding the ARF polypeptide. Suitable expression vectors may also provide translational start sites, Kozak sequences to direct translation initiation, and stop codons to end translation. In addition, preferred expression vectors may also comprise one or more polynucleotide sequences that encode polypeptides, such as His-His-His-His-His-His or the FLAG® sequence Asp-Tyr-Lys-Asp-Asp-Asp-Asp-Lys (Sigma-Aldrich, St. Louis, Mo.), which facilitates detection and affinity purification of the ARF polypeptide.

[0455] Expression may be achieved in any appropriate host cell that has been transformed or transfected with an expression vector containing a DNA molecule that encodes a recombinant polypeptide. Suitable host cells include prokaryotes, yeast, insect, and higher eukaryotic cells. Preferably, the host cells employed are E. coli, yeast, insect, or a mammalian cell line such as COS or CHO. Supernatants from suitable host/vector systems that secrete recombinant protein or polypeptide into culture media may be applied to a suitable purification matrix such as an affinity matrix or an ion exchange resin. Finally, one or more reverse phase HPLC steps can be employed to further purify a recombinant polypeptide.

[0456] Alternative Reading Frame Polypeptide Fusion Proteins and Conjugates

[0457] As indicated above, the present invention is further directed to fusion proteins and conjugates that comprise one or more ARF polypeptides. ARF polypeptide fusion proteins and conjugates may include two or more ARF polypeptides, as disclosed herein above. Fusion proteins and conjugates may also include one or more non-ARF polypeptide as discussed further below.

[0458] Within certain specific embodiments, a fusion protein may comprise multiple ARF polypeptides as described herein, or may comprise at least one ARF polypeptide as described herein and an unrelated polypeptide, such as a known tumor polypeptide. A fusion partner may, for example, assist in enhancing an immune response, preferably a cytotoxic T-cell response, or may assist in expressing the protein (an expression enhancer) at higher yields than the native recombinant ARF polypeptide. Certain preferred fusion partners are both immunological and expression enhancing fusion partners. Other fusion partners may be selected so as to increase the solubility of the protein or to enable the protein to be targeted to desired intracellular compartments. Still further fusion partners include affinity tags, which facilitate purification of the protein.

[0459] Within certain embodiments, fusion proteins and conjugates may employ an N-terminal moiety and a C-terminal moiety wherein the N-terminal moiety includes at least a portion of one or more ARF polypeptide, as described herein above, and the C-terminal moiety may include at least a portion of an “antigen presenting cell binding protein” or, more preferably, a “dendritic cell binding protein.” Equally preferred are protein conjugates wherein the C-terminal moiety includes at least a portion of one or more ARF polypeptide and the N-terminal moiety includes at least a portion of an “antigen presenting cell binding protein” or a “dendritic cell binding protein.”

[0460] The terms “antigen presenting cell binding protein” and “dendritic cell binding protein” refer to any protein for which receptors are expressed on an APC or a DC, respectively. Examples of APC binding proteins and DC binding proteins include, but are not limited to, GM-CSF, IL-1, TNF, IL-4, CD40L, CTLA4, CD28, and FLT-3 ligand.

[0461] Thus, “ARF polypeptide fusion proteins and conjugates,” as disclosed herein, include covalent complexes formed between the N-terminal moiety and the C-terminal moiety. Protein conjugates between ARF polypeptides and antigen presenting cell binding proteins/dendritic cell binding proteins may be formed either as chemical complexes or as fusion proteins, as discussed in greater detail herein below.

[0462] For example, ARF polypeptide fusion proteins and conjugates may comprise an N- or C-terminal moiety including at least about 9 amino acids of one or more ARF polypeptide and a C- or N-terminal moiety including at least a portion of an APC/DC binding protein. Other embodiments provide fusion proteins and conjugates comprising at least 10, 11, 12, 13, 14, or 15 amino acids of one or more ARF polypeptides. Still further embodiments provide fusion proteins and conjugates comprising at least 16, 17, 18, 19, or 20 amino acids of one or more ARF polypeptides. Alternative embodiments provide fusion proteins and conjugates comprising at least 25, 30, 35, 40, 45, or 50 amino acids of one or more ARF polypeptides or comprising at least 75, 100, 150, or 200 amino acids of one or more ARF polypeptides.

[0463] APCs primed with ARF polypeptide fusion proteins and conjugates are effective in activating T-cells to produce a cytotoxic cellular response against the ARF polypeptide. The level of T-cell activation achieved by such ARF polypeptide conjugate primed APCs and/or DCs is generally higher than is achieved by APCs exposed exclusively to APC's and/or DCs primed with an ARF polypeptide alone.

[0464] Equally suited to the practice of the present invention are ARF polypeptide conjugates, including fusion proteins, comprising sequence variations within the amino acid sequences of the ARF polypeptide moieties. For example, the present invention contemplates protein conjugates wherein the ARF polypeptide moieties are at least 70% identical with any of the amino acid sequences recited in SEQ ID NOs: 15 through 289, 296-300, 303-319, 350-367, 374-379, 386-390, 397-422, 429-439, 446-450, 457-466, 473-494, 501-502, 509-513, 520-521, 551-553 and 555, 559-562 and 564, 568-575 and 577, 581-588 and 590, and 594-599. More preferred are ARF polypeptide moieties that are at least 80%, 90%, 95% and 98% identical to any of the amino acid sequences recited in SEQ ID NOs: 15 through 289, 296-300, 303-319, 350-367, 374-379, 386-390, 397-422, 429-439, 446-450, 457-466, 473-494, 501-502, 509-513, 520-521, 551-553 and 555, 559-562 and 564, 568-575 and 577, 581-588 and 590, and 594-599.

[0465] As pointed out above, ARF polypeptide fusion proteins and conjugates may be formed through chemical means, such as by conventional coupling techniques, or as fusion proteins generated by expression of DNA constructs. Methodologies for generating protein conjugates, whether coupled chemically or in the form of fusion proteins, are well known and readily available in the art. For example, the N-terminal and C-terminal moieties can be coupled using a dehydrating agent such as dicyclohexylcarbodiimide (DCCI) to form a peptide bond between the two peptides. Alternatively, linkages may be formed through sulfhydryl groups, epsilon amino groups, carboxyl groups or other reactive groups present in the polypeptides, using commercially available reagents. (Pierce Co., Rockford, Ill.).

[0466] Conventional molecular biology and recombinant DNA techniques for generating fusion proteins are explained fully in the literature and are available by reference to the methodologies disclosed herein above for recombinant methodologies for the generation of ARF polypeptides.

[0467] Briefly, polynucleotide sequences encoding the N- and C-terminal moieties may be assembled separately, and ligated into an appropriate expression vector. The 3′ end of the polynucleotide encoding the N-terminal moiety is ligated, with or without a peptide linker, to the 5′ end of the polynucleotide encoding the C-terminal moiety so that the reading frames of the sequences are in phase. This permits translation into a single fusion protein that retains the biological activity of both component polypeptides.

[0468] A peptide linker sequence may be employed to separate the N-terminal and C-terminal moieties by a distance sufficient to ensure that each polypeptide properly folds into its native secondary, tertiary, and quaternary structures. Such a peptide linker sequence may be incorporated into the fusion protein or conjugate using standard techniques well known in the art. Suitable peptide linker sequences may be chosen based on the following factors: (1) their ability to adopt a flexible extended conformation; (2) their inability to adopt a secondary structure that could interact with functional amino acids on the ARF polypeptide or APC/DC binding polypeptide; and (3) the lack of hydrophobic or charged residues that might react with the ARF polypeptide or APC/DC binding polypeptide functional amino acids.

[0469] Preferred peptide linker sequences contain Gly, Asn and Ser residues. Other near neutral amino acids, such as Thr and Ala may also be used in the linker sequence. Amino acid sequences which may be usefully employed as linkers include those disclosed in Maratea et al., Gene 40:39-46 (1985); Murphy et al., Proc. Natl. Acad. Sci. USA 83:8258-8262 (1986); U.S. Pat. No. 4,935,233; and U.S. Pat. No. 4,751,180. The linker sequence may generally be from 1 to about 50 amino acids in length. Linker sequences are not required when the first and second polypeptides have non-essential N-terminal amino acid regions that can be used to separate the functional domains and prevent steric interference.

[0470] As discussed above in reference to the expression of polynucleotides encoding ARF polypeptides, the ligated polynucleotide sequences are operably linked to suitable transcriptional or translational regulatory elements. The regulatory elements responsible for expression of polynucleotides are located only 5′ to the polynucleotide sequence encoding the N-terminal moiety. Similarly, stop codons required to end translation and transcription termination signals are only present 3′ to the polynucleotide encoding the C-terminal moiety.

[0471] Fragments. Derivatives and Variants of ARF Polypeptides, Fusion Proteins, and Conjugates

[0472] It will be appreciated that ARF polypeptides, fusion proteins, and conjugates according to the present invention encompass fragments, derivatives, and variants thereof so long as the fragments, derivatives, and variants do not substantially affect the functional properties of the ARF polypeptides, conjugates and fusion proteins.

[0473] A polypeptide or protein “fragment, derivative, and variant,” as used herein, is a polypeptide or protein that differs from a native polypeptide or protein in one or more substitutions, deletions, additions and/or insertions, such that the functional activity of the polypeptide or protein is not substantially diminished. In other words, the ability of a variant to specifically bind to an antigen-presenting cell (APC) and/or a dendritic cell (DC) MHC class I molecule or to be internalized and/or processed by the APC and/or DC may be enhanced or unchanged, relative to the ARF polypeptide, conjugate or fusion protein, or may be diminished by less that 50%, and preferably less than 20%, relative to the native protein, without affecting the efficacy of the resulting ARF polypeptide, conjugate or fusion protein. Generally, suitable ARF polypeptide conjugate variants may be characterized by assessing the ability of primed APCs and/or DCs to stimulate an ARF polypeptide specific cytotoxic T-cell response.

[0474] As used herein, the term “variant” comprehends nucleotide or amino acid sequences different from the specifically identified sequences, wherein one or more nucleotides or amino acid residues is deleted, substituted, or added. Variants may be naturally occurring allelic variants, or non-naturally occurring variants. Variant sequences (polynucleotide or polypeptide) preferably exhibit at least 70%, more preferably at least 80% or at least 90%, more preferably yet at least 95%, and most preferably, at least 98% identity to a sequence of the present invention. The percentage identity is determined by aligning the two sequences to be compared as described below, determining the number of identical residues in the aligned portion, dividing that number by the total number of residues in the inventive (queried) sequence, and multiplying the result by 100. In addition to exhibiting the recited level of sequence similarity, variant sequences of the present invention preferably exhibit a functionality that is substantially similar to the functionality of the sequence against which the variant is compared.

[0475] Variants may contain “conservative amino acid substitutions,” defined as a substitution in which one amino acid is substituted for another amino acid that has similar properties, such that the secondary structure and hydropathic nature of the polypeptide is substantially unchanged. Amino acid substitutions may generally be made on the basis of similarity in polarity, charge, solubility, hydrophobicity, hydrophilicity and/or the amphipathic nature of the residues. For example, negatively charged amino acids include aspartic acid and glutamic acid; positively charged amino acids include lysine and arginine; and amino acids with uncharged polar head groups having similar hydrophilicity values include leucine, isoleucine and valine; glycine and alanine; asparagine and glutamine; and serine, threonine, phenylalanine and tyrosine. Other groups of amino acids that may represent conservative changes include: (1) ala, pro, gly, glu, asp, gln, asn, ser, thr; (2) cys, ser, tyr, thr; (3) val, ile, leu, met, ala, phe; (4) lys, arg, his; and (5) phe, tyr, trp, his. A variant may also, or alternatively, contain nonconservative changes.

[0476] Functional fragments, derivatives, and variants of a polypeptide may be identified by first preparing fragments of the polypeptide by either chemical or enzymatic digestion of the polypeptide, or by mutation analysis of the polynucleotide that encodes the polypeptide and subsequent expression of the resulting mutant polypeptides. The polypeptide fragments or mutant polypeptides are then tested to determine which portions retain biological activity, using, for example, the representative assays provided below.

[0477] Fragments, derivatives, and variants of the inventive polypeptides may also be generated by synthetic or recombinant means. Synthetic polypeptides having fewer than about 100 amino acids, and generally fewer than about 50 amino acids, may be generated using techniques well known to those of ordinary skill in the art. For example, such polypeptides may be synthesized the Merrifield solid-phase synthesis method as discussed above.

[0478] Variants may also be prepared using standard mutagenesis techniques, such as oligonucleotide-directed, site-specific mutagenesis. Kunkel, Proc. Natl. Acad. Sci. USA 82:488-492 (1985). Sections of polynucleotide sequence may also be removed using standard techniques to permit preparation of truncated polypeptides. Variants may additionally, or alternatively, be modified by, for example, the deletion or addition of amino acids that have minimal influence on the immunogenicity, secondary structure and hydropathic nature of the polypeptide.

[0479] Polypeptide fragments, derivatives, and variants preferably exhibit at least about 70%, more preferably at least about 80% or 90% and most preferably at least about 95% or 98% sequence identity to the native polypeptide or protein. Polypeptide sequences may be aligned, and percentages of identical amino acids in a specified region may be determined against another polypeptide, using computer algorithms that are publicly available. The alignment and identity of polypeptide sequences may be examined using the BLASTP algorithm. The BLASTP algorithm is described in Pearson and Lipman, Proc. Natl. Acad. Sci. USA 85:2444-2448 (1988); and in Pearson, Methods in Enzymol. 183:63-98 (1990).

[0480] The BLASTP software is available on the NCBI anonymous FTP server and is available from the National Center for Biotechnology Information (NCBI), National Library of Medicine, Building 38A, Room 8N₈O₅, Bethesda, Md. 20894. The BLASTP algorithm Version 2.0.6 [Sep. 10, 1998] and Version 2.0.11 [Jan. 20, 2000] set to the default parameters described in the documentation and distributed with the algorithm, is preferred for use in the determination of variants according to the present invention. The use of the BLAST family of algorithms, including BLASTP, is described at NCBI's website and in the publication of Altschul et al., “Gapped BLAST and PSI-BLAST: a new generation of protein database search programs,” Nucleic Acids Res. 25:3389-3402 (1997).

[0481] The “hits” to one or more database sequences by a queried sequence produced by BLASTP, or a similar algorithm, align and identify similar portions of sequences. The hits are arranged in order of the degree of similarity and the length of sequence overlap. Hits to a database sequence generally represent an overlap over only a fraction of the sequence length of the queried sequence.

[0482] The percentage identity of a polypeptide sequence is determined by aligning polypeptide sequences using appropriate algorithms, such as BLASTP, set to default parameters; identifying the number of identical amino acids over the aligned portions; dividing the number of identical amino acids by the total number of amino acids of the polypeptide of the present invention; and then multiplying by 100 to determine the percentage identity.

[0483] The BLASTP algorithm also produces “Expect” values for polypeptide alignments. The Expect value (E) indicates the number of hits one can “expect” to see over a certain number of contiguous sequences by chance when searching a database of a certain size. The Expect value is used as a significance threshold for determining whether the hit to a database indicates true similarity. For example, an E value of 0.1 assigned to a polypeptide hit is interpreted as meaning that in a database of the size of the SwissProt database, one might expect to see 0.1 matches over the aligned portion of the sequence with a similar score simply by chance. By this criterion, the aligned and matched portions of the sequences then have a probability of 90% of being related. For sequences having an E value of 0.01 or less over aligned and matched portions, the probability of finding a match by chance in the SwissProt database is 1% or less using the BLASTP algorithm.

[0484] According to one embodiment, “variant” ARF polypeptides, with reference to each of ARF polypeptides of the present invention, preferably comprise sequences having the same number or fewer amino acids than each of the ARF polypeptides of the present invention and producing an E value of 0.01 or less when compared to the ARF polypeptide of the present invention.

[0485] In addition to having a specified percentage identity to an inventive ARF polypeptide, variant polypeptides preferably have additional structure and/or functional features in common with the inventive ARF polypeptide. Polypeptides having a specified degree of identity to an ARF polypeptide of the present invention share a high degree of similarity in their primary structure and have substantially similar functional properties. In addition to sharing a high degree of similarity in their primary structure to ARF polypeptides of the present invention, polypeptides having a specified degree of identity to, or capable of hybridizing to, an inventive polypeptide preferably have at least one of the following features: (i) they have substantially the same functional properties as an inventive ARF polypeptide; or (ii) they contain identifiable domains in common.

[0486] Antigen Presenting Cell- and Dendritic Cell-Based ARF Polypeptide Compositions

[0487] As indicated above, within certain embodiments, the present invention provides immunotherapeutic compositions for the treatment of cancers and infectious diseases comprising antigen presenting cells (APCs), including dendritic cells (DCs), primed with one or more ARF polypeptide, conjugate and/or fusion protein. APCs may be primed by exposure ex vivo and/or in vivo to an ARF polypeptide such that the APCs are effective in activating T-cells to produce a cytotoxic T-cell (CTL) response against the ARF polypeptide. APCs may, alternatively or additionally, be primed by exposure ex vivo and/or in vivo to a polynucleotide encoding one or more of the ARF polypeptides and/or fusion proteins presented herein.

[0488] As used herein, the term “antigen presenting cells” or “APCs” refers to cells that are capable of activating T-cells, and include, but are not limited to, certain macrophages, B cells, and, most preferably, dendritic cells (DCs). “Potent antigen presenting cells” are cells that, after being pulsed with an ARF polypeptide, conjugate and/or fusion protein, can activate naïve CD8⁺ cytotoxic T-cells in a primary immune response. “Dendritic cells” or “DCs” are members of a diverse population of morphologically similar cell types found in lymphoid or non-lymphoid tissues. These cells are characterized by their distinctive morphology and high levels of surface MHC-class II expression. Steinman et al., Ann. Rev. Immunol. 9:271 (1991), incorporated herein by reference. APCs and DCs can be isolated from a number of tissue sources, and conveniently, from peripheral blood, as described herein. Preferred immunotherapeutic compositions of the present invention employ APCs or DCs that are isolated from a cancer patient and/or a patient afflicted with an infectious disease.

[0489] APCs and DCs may be isolated by routine methodologies that are readily available in the art. An exemplary suitable methodology for isolation of DCs is disclosed in U.S. Pat. Nos. 5,976,546, 6,080,409, and 6,210,662. Briefly, buffy coats may be prepared from peripheral blood. Cells may be harvested from leukopacs, layered over columns of organosilanized colloidal silica (OCS) separation medium (prepared as described by Dorn in U.S. Pat. No. 4,927,749, incorporated herein by reference, at a density 1.0770 gr/ml, pH 7.4, 280 mOsm/kg H₂O) in centrifuge tubes or devices. The OCS medium is preferably prepared by reacting and thus blocking the silanol groups of colloidal silica (approx. 10-20 nm diameter particles) with an alkyl trimethoxy silane reagent.

[0490] Related colloidal silicas and methods for production thereof are disclosed in U.S. Pat. No. 4,927,749 to Dorn. In a preferred embodiment, the OCS density gradient material is diluted to an appropriate specific density in a physiological salt solution supplemented with polyvinylpyrrolidone (PVP) such as PVP-10 available from Sigma Chemical Co. (St. Louis, Mo.). The tubes are centrifuged and the peripheral blood mononuclear cells (PBMC), present at the interface, are harvested.

[0491] PBMC are resuspended and centrifuged again to remove platelets and may optionally be spun through columns of OCS (density 1.0650 gr/ml, 280 mOsm/kg H₂O). The resulting interface and pellet cells are harvested and washed with D-PBS by centrifugation. The pellet fraction is resuspended in cell culture medium and cultured in a humidified 5% CO₂ incubator for 40 hours. Following incubation, the non adherent cells are harvested. The purity of dendritic cells in the interface fraction may be quantified by FACS analysis.

[0492] The morphology of the cells can be evaluated using photomicroscopy. The DC enriched fraction contains large sized veiled cells with cytoplasmic processes extending from the cell surface, features characteristic of DC.

[0493] Cell surface phenotypic analysis may also be carried out through flow cytometric methodology. For example, samples consisting of approximately 1-3×10⁷ cells may be incubated in 10% normal mouse serum in PBS for 10 min., washed in PBS, and resuspended in 250-750 μl PBS. The cell suspension may then dispensed at 30 μl/well into round-bottom 96-well plates. FITC-, PE-, and PerCP-conjugated mAb are then added at 10 μl/well and cells incubated for 20 min. in the dark on ice. Cells are then washed with 200 μl/well of PBS and resuspended in 400 μl/well in PBS, then analyzed by FACScan (Becton Dickinson) using cells labeled with isotype-matched control Ab as a negative control. Preferred functional characteristics of mature DCs include the acquisition of allostimulatory and Ag-presenting abilities.

[0494] Within certain embodiments, APCs and DCs are primed with one or more ARF polypeptides, fusion proteins and/or conjugates described herein above. Generally, ARF polypeptides, fusion proteins and/or conjugates are applied in any combination repeatedly or in a sequential manner such that the primed DC are effective in presenting antigen in the context of MHC class I. Within such embodiments, ARF polypeptide primed DC are capable of processing the immunogenic ARF polypeptide through the “endogenous” class I pathway such that antigens are presented in association with MHC class I molecules, and accordingly are able to activate CD8⁺ CTL.

[0495] Enriched DC may be resuspended in RPMI media at a concentration of approximately 10⁶ cells/ml, incubated in the presence of one or more ARF polypeptide, fusion protein and/or conjugate at a concentration of approximately 50 μg/ml for 4-5 hours or overnight in a humidified 37° C. incubator with 5% CO₂.

[0496] Primed DC are generally washed of free ARF polypeptide, fusion protein, and/or conjugate with injection grade saline and resuspended into a volume of approximately 100 ml in an intravaneous injection administration bag. It will be understood that, depending on the precise treatment regimen contemplated, ARF polypeptide primed DC may be administered parenterally (e.g., intravenously (IV)), subcutaneously (SC), intraperitoneally (IP), and intramuscularly (IM).

[0497] For example, in the case of IV administration, patients may be premedicated with acetaminophen and diphenhydramine and administered the ARF polypeptide primed DC through a peripheral intravenous line or a central catheter over a period of 30-60 minutes. Generally, primed APC are administered at regular intervals for a short time period, e.g., in bi-weekly intervals for two months or less. Depending on the precise application, patients may receive 1, 2, 3, or 4 additional similar preparations of ARF polypeptide, fusion protein, and/or conjugate primed DC.

[0498] In one aspect of this embodiment, the ARF polypeptide primed DC comprises from approximately 10⁷ to approximately 10¹¹ DC, which have been exposed to from about 100 ng/ml to 1 mg/ml of a given ARF polypeptide, in a manner effective to generate Ag-loaded DC. Doses of about 10⁷ to 10¹¹ DC are then administered to the patient by IV, SC or IM injection according to established procedures for a short time period, e.g., at bi-weekly intervals for 2 months or less. In some cases, however, the ARF polypeptide primed DC is administered intermittently over a longer period of time.

[0499] Within alternative embodiments, polynucleotides encoding one or more ARF polypeptides and/or fusion proteins may be introduced into APCs and DCs thereby permitting the expression of the respective ARF polypeptide and/or fusion protein. Thus, DNA encoding an ARF polypeptide or fusion protein may be cloned into a suitable expression vector and the APC or DC transfected with the resulting expression construct such that the ARF polypeptide or fusion protein is expressed in association with class I MHC.

[0500] Any of a variety of known methodology may be used for such transfections including, but not limited to, CaPO₄ precipitation, lipofection, naked DNA exposure, as well as viral vector-based approaches, such as retroviral, adenoviral, AAV, and vaccinia virus vectors. See, for example, Ausubel et al., “Current Protocols in Molecular Biology” (J. Wiley and Sons, Inc.) and Mulligan, Science 260(5110):926-32 (1993). Suitable exemplary viral vector systems are described in detail herein below.

[0501] By still further embodiments of the present invention, ARF polypeptides, fusion proteins and/or conjugates and polynucleotides encoding ARF polypeptides, fusion proteins and/or conjugates may be administered directly to a mammal, including a human, to achieve in vivo APC/DC priming. For example, one or more ARF polypeptide or polynucleotide may be injected directly into a human patient in a manner effective to induce cell-surface presentation of the immunogenic component of the ARF polypeptide.

[0502] Typically, one or more doses of the ARF polypeptide, fusion protein and/or conjugate is administered, generally at bi-weekly intervals for a period of about two months. Preferred doses for administration by the IV, SC or IM route are from about 5 μg/kg per patient to about 5 mg/kg per patient. ARF polypeptides, fusion proteins and/or conjugates are most commonly administered in conjunction with a pharmaceutically acceptable carrier or excipient including, but not limited to, saline, phosphate buffered saline (PBS), water and Ringer's solution. It will be understood that the choice of suitable physiologically acceptable carrier or excipient will vary depending upon the chosen mode of administration.

[0503] Regardless of the precise mode of administration, systemic reaction to the administration procedure should be carefully monitored. For example, systemic reactions may be scored for temperature, blood pressure, and signs of bronchospasm, vasculitis, and/or immune complex formation. The risk of anaphylaxis is, however, extremely low with the use of autologous cells.

[0504] Viral Vector Systems for Administration of Polynucleotides Encoding ARF Polypeptides and Fusion Proteins

[0505] As disclosed herein, polynucleotides encoding one or more ARF polypeptide and/or fusion protein may be cloned into an expression vector, such as a viral vector, to permit ex vivo administration to APCs and/or in vivo administration to a mammal, such as a human. Suitable vector systems for introducing such polynucleotides into APC include, but are not limited to adenovirus-, retrovirus-, and adeno-associated virus-based expression vectors. Alternatively one of a wide variety of commercially available non-viral expression vector systems may be employed.

[0506] Thus, within certain embodiments, administration of one or more polynucleotides may be achieved through the use of an adenovirus-based expression vector. As used herein, the phrase “adenovirus-based expression vector” is meant to include those expression vector constructs containing adenovirus sequences that are sufficient to (a) support packaging of the construct and (b) permit expression of a cloned ARF polynucleotide.

[0507] Viruses provide an efficient means for delivering DNA into the nucleus of a cell. Furthermore, class I presentation of antigenic peptides is inherent in virus mediated DNA delivery. Replication incompetent viruses bind the surface of the target cell and are readily engulfed by the cell.

[0508] The present invention contemplates the use of adenovirus vectors encoding one or more antigen transcriptional units using constitutive promoters such as CMV where the preferred antigens include TAA enconded Arf antigens presented herein above. Thus, adenoviral vectors as described herein may be engineered to encode fusions of one or more of the tumor associated antigen 5′ UTR- and/or structural gene-encoding ARF polypeptide sequences presented herein. Transcriptional units in the adenovirus, whose promoter function is restricted to APCs, may be suitably employed for the appropriate cell specific expression of the ARF, ARF fusion protein, and/or ARF conjugate of the present invention. For example, the human fascin gene promoter may be used to facilitate transcriptional targeting of mature DC because fascin expression is required for dendritic cell maturation. Bros et al., J. Immunol. 171:1825-1834 (2003). Adenoviruses may be used as a protein or a DNA delivery vehicle by making benign fusion proteins between adenovirus coat proteins and target antigen. Within such an embodiment, the virus would carry both the DNA encoding target antigen and protein antigens itself.

[0509] Adenovirus-based expression vectors are generally genetically engineered forms of the 36 kb, linear, double-stranded DNA virus. Conventional adenovirus vectors permit the substitution of up to 7 kb fragments of adenoviral DNA with non-adenoviral polynucleotide sequences. Adenoviruses can infect virtually all cells regardless of their cell cycle stage; the infection of host cells does not result in chromosomal integration because adenoviral DNA can replicate in an episomal manner without potential genotoxicity.

[0510] Adenovirus with serotype-11 or -35 knob-protein will bind human CD46⁺ cells and deposit their DNA in the nucleus. CD46 is found on the surface of APC cells. The loading capacity of the viral backbone for exogenous DNA is greater than 8000 nucleotides, enough for several transcriptional units. Viral hybrids of adenovirus serotype-2 backbone with adenovirus serotype-11 knob-protein may be constructed and used to introduce genes encoding antigens to CD46⁺ APC cells ex vivo. Such ex vivo administration of ARF encoding DNA sequences may be advantageously employed to avoid a neutralizing humoral response to subsequent adenovirus vaccinations. The polynucleotide sequences of human adenoviruses of serotypes 2, 5, and 11 are presented herein as SEQ ID NOs: 731, 732, and 733, respectively.

[0511] Both ends of the adenoviral genome contain 100-200 base pair inverted repeats (ITRs), which are cis elements necessary for viral DNA replication and packaging. The early (E) and late (L) regions of the genome contain different transcription units that are divided by the onset of viral DNA replication. The E1 region (E1A and E1B) encodes proteins responsible for the regulation of transcription of the viral genome and a few cellular genes. Expression of the E2 region (E2A and E2B) results in the synthesis of the proteins for viral DNA replication. These proteins are involved in DNA replication, late gene expression and host cell shut-off. Renan, Radiother Oncol. 19(3):197-218 (1990).

[0512] The products of the late genes, including the majority of the viral capsid proteins, are expressed only after significant processing of a single primary transcript issued by the major late promoter (MLP). The MLP, (located at 16.8 m.u.) is particularly efficient during the late phase of infection, and all the mRNA's issued from this promoter possess a 5′-tripartite leader (TPL) sequence which makes them preferred mRNA's for translation.

[0513] Generation and propagation of the current adenovirus vectors, which are replication deficient, depend on a unique helper cell line, designated 293, which was transformed from human embryonic kidney cells by Ad5 DNA fragments and constitutively expresses E1 proteins. Graham, Adv Cancer Res. 25:1-51 (1977). Since the E3 region is dispensable from the adenovirus genome, current adenovirus vectors, with the help of 293 cells, carry foreign DNA in either the E1, the E3, or both regions. Jones et al., Cell 13(10:181-8 (1978) and Graham et al., Mol Biotechnol. 3(3):207-20. (1995).

[0514] Helper cell lines may be derived from human cells such as human embryonic kidney cells, muscle cells, hematopoietic cells or other human embryonic mesenchymal or epithelial cells. Alternatively, the helper cells may be derived from the cells of other mammalian species that are permissive for human adenovirus. Such cells include, e.g., Vero cells or other monkey embryonic mesenchymal or epithelial cells. The currently preferred helper cell line is 293.

[0515] The adenovirus may be of any of the 42 different known serotypes or subgroups A-F. Adenovirus type 5 of subgroup C is the preferred starting material in order to obtain the conditional replication-defective adenovirus vector for use in the present invention.

[0516] Preferred adenovirus-based expression vectors according to the present invention are replication defective and are deleted in the E1 region. Generally, but not necessarily, an ARF polypeptide and/or fusion protein encoding polynucleotide may be cloned into the adenovirus vector within the region of the deleted E1-coding sequence. The polynucleotide encoding the ARF polypeptide and/or fusion protein may, alternatively, be inserted in lieu of the deleted E3 or E4 regions. See, e.g., Karlsson et al., EMBO J. 5(9):2377-85 (1986).

[0517] Within other embodiments, the present invention provides retroviral-based expression vectors for the ex vivo and in vivo expression of polynucleotides encoding ARF polypeptide and/or fusion proteins. Retroviruses are a group of single-stranded RNA viruses characterized by an ability to convert their RNA to double-stranded DNA in infected cells by a process of reverse-transcription. Coffin, Curr. Top. Microbiol. Immunol. 176:143-64 (1992). The resulting DNA then stably integrates into cellular chromosomes as a provirus and directs synthesis of viral proteins. Integration results in the retention of the viral gene sequences in the recipient cell and its descendants.

[0518] Retroviral genomes contain three genes, gag, pol, and env that code for capsid proteins, polymerase enzyme, and envelope components, respectively. A sequence found upstream from the gag gene contains a signal for packaging of the genome into virions. Two long terminal repeat (LTR) sequences are present at the 5′ and 3′ ends of the viral genome. These contain strong promoter and enhancer sequences and are also required for integration in the host cell genome. Id.

[0519] Retroviral-based expression vectors of the present invention comprise a polynucleotide encoding one or more ARF polypeptide and/or fusion protein as described herein above. A polynucleotide(s) is inserted into the viral genome in place of viral sequences required for viral that is replication-defective. In order to produce virions, a packaging cell line containing the gag, pol, and env genes but without the LTR and packaging components is employed. Mann et al., Cell 33(1):153-9 (1983). Upon introduction of a retroviral-based vector into a suitable packaging cell line (such as by CaPO₄ precipitation), a packaging sequence facilitates packaging of the RNA transcript into viral particles, which are then secreted into the culture media. Nicolas et al., Biotechnology 10:493-513 (1988); Temin, Cell Biophys. 9(1-2):9-16. (1986); and Mann et al., supra. Media containing the recombinant retrovirus is collected, concentrated, and administered either ex vivo to dividing APC and/or DC or in vivo to a mammal, such as a human.

[0520] Still further embodiments of the present invention employ adeno-associated viruses to achieve ex vivo and/or in vivo expression of one or more polynucleotide encoding an ARF polypeptide and/or fusion protein and described herein above. Adeno-associated virus (AAV) is a parovirus, discovered as a contamination of adenoviral stocks. Hermonat et al., Proc Natl Acad Sci USA. 81(20):6466-70 (1984). Five serotypes have been isolated, of which AAV-2 is the best characterized. AAV has a single-stranded linear DNA that is encapsidated into capsid proteins VP1, VP2 and VP3 to form an icosahedral virion of 20 to 24 nm in diameter. McLaughlin et al., J. Virol. 62(6):1963-73 (1988).

[0521] The AAV DNA is approximately 4.7 kilobases long, contains two open reading frames (rep and cap), and is flanked by two ITRs. The rep gene encodes proteins responsible for viral replication and cap encodes capsid protein VP1-3. Each ITR forms a T-shaped hairpin structure and are the only essential cis components of the AAV for chromosomal integration. Thus, the AAV can be used as a vector with all viral coding sequences removed and replaced by the cassette of genes for delivery.

[0522] Three viral promoters have been identified and named p5, p19, and p40, according to their map position. Transcription from p5 and p19 results in production of rep proteins, and transcription from p40 produces the capsid proteins. Hermonat et al., supra.

[0523] Other viral vector expression systems may be suitably employed for the ex vivo and in vivo expression of polynucleotides encoding ARF polypeptides and fusion proteins in APC and/or DC. For example, vectors derived from viruses such as vaccinia virus, lentiviruses, polio viruses and herpesviruses may be employed. The hepatitis B virus retains the capacity for helper-dependent packaging and reverse transcription despite the deletion of up to 80% of its genome. Horwich et al., J. Virol. 64(2):642-50 (1990). This suggests that large portions of the genome can be replaced with foreign genetic material.

[0524] Immunotherapeutic Methods

[0525] As indicated above, within certain embodiments, the present invention provides methods for identifying ARF polypeptides capable of stimulating an immune response. By these methods, an antigen of interest is selected wherein the antigen is encoded by a polynucleotide; rf1 and/or rf2 alternative reading frame polypeptides encoded by the polynucleotide are identified; and polypeptides encoded by the rf1 and rf2 reading frames are synthesized. Antigen presenting cells (APCs) are primed with each of the ARF polypeptides to be tested and the primed APCs contacted with naïve cytotoxic T-cells (CTLs) to produce a population of activated CTLs. The population of CTLs are contacted with cells expressing the antigen of interest to test for an ARF polypeptide-specific cytotoxic T-cell response. Lysis of the antigen expressing cell by the activated CTLs indicates that the ARF polypeptide is capable of stimulating an immune response.

[0526] Within other embodiments, the present invention further provides methods for eliciting an immune response in a patient and for inhibiting proliferation of a tumor cell in a cancer patient. By these methods, a sample containing antigen presenting cells (APCs) is obtained, the APCs isolated, and primed ex vivo with one or more ARF polypeptide, conjugate and/or fusion protein. The primed APCs are administered to a patient in order to stimulate an in vivo immune response.

[0527] Related methods are provided for inhibiting proliferation of a tumor cell in a cancer patient. These methods comprise the steps of obtaining from the cancer patient a sample containing antigen presenting cells (APCs) and isolating the APCs from the sample. The isolated APCs may be primed ex vivo with an ARF polypeptide, conjugate and/or fusion protein such that the primed APCs are capable of stimulating an immune response in vivo. The primed APCs are administered to the cancer thereby inhibiting proliferation of the tumor cell.

[0528] Within preferred embodiments, the immune response is a cytotoxic T-cell response wherein the cytotoxic T-cell response is directed specifically against a tumor cell. Specific preferred embodiments provide that the APCs are dendritic cells (DCs).

[0529] Within preferred methods, the tumor cell is isolated from a patient afflicted with a cancer such as, for example, a soft tissue sarcoma, a lymphoma, and/or a cancer of the brain, esophagus, uterus, cervix, bone, lung, endometrium, bladder, breast, larynx, colon/rectum, stomach, ovary, pancreas, adrenal gland and prostate. Tumor cells may be obtained from patients afflicted with other cancers as well.

[0530] The following Examples are offered by way of illustration and not limitation.

### EXAMPLE 1

### Synthesis of Alternative Reading Frame Polypeptides

[0531] All polypeptides disclosed herein were synthesized by Genemed Synthesis, Inc. (South San Francisco, Calif.). Mass spectrophotometric analysis and C-18 reverse phase chromatography were used to confirm each peptide's molecular weight and to test the chemical uniformity of each polypeptide, respectively. For all polypeptide pools, equal weights of each lyophilized polypeptide were combined in each pool and the pooled polypeptides were dissolved in dimethyl formamide (DMF) at a concentration of 1 mM (assuming equivalent molecular weights).

### EXAMPLE 2

### Human HER-2 Alternative Reading Frame Polypeptides

[0532] This example discloses alternative reading frame (ARF) polypeptides that were designed and synthesized based on the polynucleotide presented herein as SEQ ID NO: 2 (Genbank Accession No. M11730) that encodes the amino acid sequence of the human tyrosine kinase receptor (hHER-2) presented herein as SEQ ID NO: 1.

[0533] The hHER-2 polynucleotide sequence was analyzed for alternative reading frames encoding AUG initiated polypeptides of equal to or greater than 9 amino acids where the AUG is downstream of (i.e. 3′ to) the AUG utilized for normal translation initiation. Fifteen ARF polypeptides were identified wherein an AUG sequence is within the rf1 or rf2 reading frame. In addition, the two polypeptides corresponding to reading frames rf1 and rf2 that initiate one and two nucleotides downstream, respectively, of the normal rf0 AUG initiation site were also included. In total, thirteen of these ARF polypeptides are within the rf1 reading frame and four of these ARF polypeptides are within the rf2 reading frame. Overlapping polypeptides encompassing these 17 ARF polypeptides are presented in Table 1.

[0534] Pool A comprises 32 polypeptides, designated as polypeptides 203 through 3431C, having an average length of twenty-three residues. Overlapping polypeptides were synthesized such that these 32 polypeptides encompass the fifteen rf1 and rf2 AUG-initiated alternative reading frames.

[0535] Pool B comprises 31 polypeptides, designated 2A through 3Y, having an average length of fifteen residues. Overlapping polypeptides were synthesized such that these 31 polypeptides encompass the two ARF open reading frames (i.e. a twenty-nine residue 2:91 rf1-2 polypeptide and a 107 residue 2:323 rf2-3 polypeptide). The rf1 and rf2 polypeptides initiate at position two and position three of the HER-2 rf0 AUG, respectively, where the rf0 HER-2 ‘A’ of AUG defines position one.

[0536] Pool B was further subdivided into two pools, Pool B2 and Pool B3. Pool B2 comprises six overlapping peptides, designated 2A through 2F, which correspond to the 2:91 rf1-2 ARF open reading frame. Pool B3 comprises twenty-five overlapping peptides, designated 3A through 3Y, which corresponds to the 3:323 rf2-3 ARF open reading frame.

TABLE 1

Human HER-2 Alternative Reading
Frame Polypeptides
(Derived from the hHER-2 polynucleotide
sequence presented herein as
SEQ ID NO: 2, Genbank Accession No. M11730)

| | |
|---|---|
| Sequence | SEQ ID NO: |

| | |
|---|---|
| APWSWRPCAAGGSSSPSCPPEPRAP | 15 |
| KCAPAQT | |
| ARPPPLAAPRNPRAPSRVQPEPWGR | 16 |
| SRSEHHGAGGLVPLGAPPRPLAPRS | |
| REHPSVHRHRHEAAAPCQSRDPPG | |
| HAPPPLPGLPGGAGKPGTHLPAHQ | |
| CQPVLPAGYPGGAGLRAHRSQPSE | |
| AGPTAEAADCARHPAL | |
| MPACPSCRISRRCRATCSSLTTK | 17 |
| MSSVLPAARAPSTLTAWPASTSTTV | 18 |
| ASVSCTAQPWSPTTQTRLSPCPIPRA | |
| GIHSAPAV | |
| MEHSGVRSAASPVPECAMVWAWS | 19 |
| TCER | |
| MGTQPPTLPRSSQSSSKCLRLWKRS | 20 |
| QVTYTSQHGRTACLTSASSRTCK | |
| MPSTAGAPQGVCECQALFAVPP | 21 |
| MPGTVCRATLSVSPRMAQ | 22 |
| MRRAHASLAPSTAPTPVWTWMTR | 23 |
| AAPPSREPAL | |
| MPALPHQLHPLLCGPG | 24 |
| MSPAFWASA | 25 |
| MSGKTADAWAPRTC | 26 |
| MCGSYTGTWPLGTCWSRVPTMSK | 27 |
| LQTSGWLGCWTLTRQSTMQMGAR | |
| CPSSGWRWSPFSAGGSPTRVMCGV | |
| MV | |
| MGSQPGRSLTCWKRGSGCPSPPSA | 28 |
| PLMST | |
| MSAKIPGVGV | 29 |
| MRTWAQPVPWTAPSTAHCWRTM | 30 |
| TWGTWWMLRSIWYPSRASSVQTL | |
| PRALGAWSTTGTAAHLPGVAVGT | |
| MYLMVTWEWGQPRGCKASPHMT | 31 |
| PALYSGTVRTPQYPCPLRLMATLPP | |
| MFGPSPLRPERALCLLPDLLVPLWK | 32 |
| GPRLSPQGRMGSSKTFLPLGVPWR | |
| TPS | |

[0537] TABLE 2

Human HER-2 Alternative Reading
Frame Polypeptide Pools
(Designed based upon the hHER-2 ARF
polypeptides presented in Table 1)

SEQ

| | | |
|---|---|---|
| Identifier | Sequence | ID NO: |

Pool A

| | | |
|---|---|---|
| 203 | MPACPSCRISRRCRATCSSLTTK | 33 |
| 710A | MSSVLPAARAPSTLTAWPASTST | 34 |
| 710B | TAWPASTSTTVASVSCTAQPWSP | 35 |
| 710C | VSCTAQPWSPTTQTRLSPCPIP | 36 |
| 710D | QTRLSPCPIPRAGIHSAPAV | 37 |
| 977 | MEHSGVRSAASPVPECAMVWAWSTCER | 38 |
| 1145A | MGTQPPTLPRSSQSSSKCLRLWK | 39 |
| 1145B | SSSKCLRLWKRSQVTYTSQHGRT | 40 |
| 1145C | VTYTSQHGRTACLTSASSRTCK | 41 |
| 1629 | MPSTAGAPQGVCECQALFAVPP | 42 |
| 1667 | MPGTVCRATLSVSPRMAQ | 43 |
| 1853A | MRRAHASLAPSTAPTPVWTWMT | 44 |
| 1853B | APTPVWTWMTRAAPPSREPAL | 45 |
| 1866 | MPALPHQLHPLLCGPG | 46 |
| 2426 | MSGKTADAWAPRTC | 47 |
| 2513A | MCGSYTGTWPLGTCWSRVPTMSK | 48 |
| 2513B | CWSRVPTMSKLQTSGWLGCWTLT | 49 |
| 2513C | SGWLGCWTLTRQSTMQMGARCPS | 50 |
| 2513D | TMQMGARCPSSGWRWSPFSAGGS | 51 |
| 2513E | RWSPFSAGGSPTRVMCGVMV | 52 |
| 2771 | MGSQPGRSLTCWKRGSGCPSPPSAPLMST | 53 |
| 2892 | MSAKIPGVGV | 54 |
| 2972A | MRTWAQPVWTAPSTAHCWRTMTWG | 55 |
| 2972B | AHCWRTMTWGTWWMLRSIWYPSRA | 56 |
| 2972C | LRSIWYPSRASSVQTLPRALGAWS | 57 |
| 2972D | TLPRALGAWSTTGTAAHLPGVAVGT | 58 |
| 3251A | MYLMVTWEWGQPRGCKASPHMTPA | 59 |
| 3251B | CKASPHMTPALYSGTVRTPQYPCP | 60 |
| 3251C | TVRTPQYPCPLRLMATLPP | 61 |
| 3431A | MFGPSPLRPERALCLLPDLLVPLWK | 62 |
| 3431B | LPDLLVPLWKGPRLSPQGRMGSSKT | 63 |
| 3431C | PQGRMGSSKTFLPLGVPWRTPST | 64 |

Pool B

Pool B2

| | | |
|---|---|---|
| 2A | WSWRPCAAGGSSSPS | 65 |
| 2B | PCAAGGSSSPSCPPE | 66 |
| 2C | GGSSSPSCPPEPRAP | 67 |
| 2D | SPSCPPEPRAPKCAP | 68 |
| 2E | PPEPRAPKCAPAQT | 69 |
| 2F | RAPKCAPAQT | 70 |

Pool B3

| | | |
|---|---|---|
| 3A | GAGGLVPLGAPPRPL | 71 |
| 3B | LVPLGAPPRPLAPRS | 72 |
| 3C | GAPPRPLAPRSREHP | 73 |
| 3D | RPLAPRSREHPSVHR | 74 |
| 3E | PRSREHPSVHRHRHE | 75 |
| 3F | EHPSVHRHRHEAAAP | 76 |
| 3G | VHRHRHEAAAPCQSR | 77 |
| 3H | RHEAAAPCQSRDPPG | 78 |
| 3I | AAPCQSRDPPGHAPP | 79 |
| 3J | QSRDPPGHAPPPLPG | 80 |
| 3K | PPGHAPPPLPGLPGG | 81 |
| 3L | APPPLPGLPGGAGKP | 82 |
| 3M | LPGLPGGAGKPGTHL | 83 |
| 3N | PGGAGKPGTHLPAHQ | 84 |
| 3O | GKPGTHLPAHQCQPV | 85 |
| 3P | THLPAHQCQPVLPAG | 86 |
| 3Q | AHQCQPVLPAGYPGG | 87 |
| 3R | QPVLPAGYPGGAGLR | 88 |
| 3S | PAGYPGGAGLRAHRS | 89 |
| 3T | PGGAGLRAHRSQPSE | 90 |
| 3U | GLRAHRSQPSEAGPT | 91 |
| 3V | HRSQPSEAGPTAEAA | 92 |
| 3W | PSEAGPTAEAADCAR | 93 |
| 3X | GPTAEAADCARHPAL | 94 |
| 3Y | EAADCARHPAL | 95 |

### EXAMPLE 3

### Mouse TERT Alternative Reading Frame Polypeptides

[0538] This example discloses alternative reading frame (ARF) polypeptides that were designed and synthesized based on the polynucleotide presented herein as SEQ ID NO: 6 (Genbank Accession No. NM_{—}009354) that encodes the amino acid sequence of telomerase reverse transcriptase (mTERT) presented herein as SEQ ID NO: 5.

[0539] The mTERT polynucleotide sequence was analyzed for alternative reading frames encoding AUG initiated polypeptides of equal to or greater than 9 amino acids where the AUG is downstream of the AUG utilized for normal translation initiation. Fifteen ARF polypeptides were identified wherein an AUG sequence is within the rf1 or rf2 reading frame. In addition, the two polypeptides corresponding to reading frames rf1 and rf2 that initiate one and two nucleotides downstream, respectively, of the normal rf0 AUG initiation site were also included. In total, 12 of these ARF polypeptides are within the rf1 reading frame and 5 of these ARF polypeptides are within the rf2 reading frame. Overlapping peptides comprising these seventeen total mTERT alternative reading frame polypeptides are presented in Table 4.

[0540] ARF polypeptides corresponding to human TERT (hTERT) are disclosed in Table 5. Full-length hTERT polypeptide and polynucleotide sequences are disclosed herein as SEQ ID NOs: 3 and 4, respectively, and available through Genbank Accession No. NM_{—}003219.

[0541] Pool 1 comprises 32 polypeptides, designated 3A through 5J, having an average length of 15 amino acids. These polypeptides correspond to two ARF open reading frames, a 100 amino acid rf2 polypeptide, initiating at nucleotide 3 and extending to nucleotide 302, and a 53 amino acid rf1 polypeptide, initiating at nucleotide 5 and extending to nucleotide 163.

[0542] Pool 2 comprises 23 polypeptides, designated 408A through 1214B, having an average length of 15 amino acids. These polypeptides correspond to four ARF open reading frames that are initiated by an AUG downstream of the site of normal translation initiation.

[0543] Pool 3 comprises 28 polypeptides, designated 1355A through 3240C, having an average length of 15 amino acids. These polypeptides correspond to nine ARF open reading frames that are initiated by an AUG downstream of, and distal to, the site of normal translation initiation.

TABLE 3

Mouse TERT Alternative Reading
Frame Polypeptides
(Derived from the polynucleotide
presented herein as
SEQ ID NO: 6, Genbank Accession No. NM_009354)

| | |
|---|---|
| Sequence | SEQ ID NO: |

| | |
|---|---|
| PALLVAPRCALCCAADTGRCGRWQP | 96 |
| LCGAWGPRAGGLCNPGTRRSTALWL | |
| PNA | |
| NDPRSSLPRGALSAAQPIPGGVAAGN | 97 |
| LCAAPGARGQAACATRGPEDLPHFG | |
| CPMPSVHALGLTASTCRPFLPPGVIPE | |
| RAGGQGCAETLRAQREKRAGFWL | |
| MPSVHALGLTASTCRPFLPPGVIPE | 98 |
| RAGGQGCAETLRAQREKRAGFWL | |
| MDATVEPSGRRPAGLPAGTLCSLS | 99 |
| SGAPQLCLPGVWVSPVPNLCHHG | |
| YLALCVR | |
| MLSCPESGGGTPQAGATNPIRQIM | 100 |
| GAKSCSVPRGAYCRERFVF | |
| MPFSSGHLLRPDISFTPGEMAKSV | 101 |
| MQSANMSDSSGHIAGFEQQTNR | 102 |
| MVFFGPVSARWCLLVSGVPGTM | 103 |
| SAASLRT | |
| MSGQNILTLWGLLYWV | 104 |
| MTSTGPGGPLCCVCVLWTRHPG | 105 |
| CTLLRQM | |
| MMPSPRVSWWRLLPI | 106 |
| MQWSGEIAKAKSTSPLGDRSPPS | 107 |
| LTSSHTWASSLSICRIQMPVH | |
| MRAAAACLTSSCTSCVTVS | 108 |
| MGCFYVLLMTFCW | 109 |
| MPRPQLRRASPSRVSSKLGRPCG | 110 |
| TSSCRSCG | |
| MSPGTSEDSPKTAVPEAPRGDND | 111 |
| HP | |

[0544] TABLE 4

Mouse TERT Alternative Reading
Frame Polypeptide Pools
(Designed based upon the mTERT ARF
polypeptides presented in Table 3)

| | | |
|---|---|---|
| Identifier | Sequence | SEQ ID NO: |

Pool 1

| | | |
|---|---|---|
| 3A | DPRSSLPRGALSAAQ | 112 |
| 3B | SLPRGALSAAQPIPG | 113 |
| 3C | GALSAAQPIPGGVAA | 114 |
| 3E | AAQPIPGGVAAGNLC | 115 |
| 3F | IPGGVAAGNLCAAPG | 116 |
| 3G | VAAGNLCAAPGARGQ | 117 |
| 3H | NLCAAPGARGQAACA | 118 |
| 3I | APGARGQAACATRGP | 119 |
| 3J | RGQAACATRGPEDLP | 120 |
| 3K | ACATRGPEDLPHFGC | 121 |
| 3L | RGPEDLPHFGCPMPS | 122 |
| 3M | DLPHFGCPMPSVHAL | 123 |
| 3O | FGCPMPSVHALGLTA | 124 |
| 3P | MPSVHALGLTASTCR | 125 |
| 3Q | HALGLTASTCRPFLP | 126 |
| 3R | LTASTCRPFLPPGVI | 127 |
| 3S | TCRPFLPPGVIPERA | 128 |
| 3T | FLPPGVIPERAGGQG | 129 |
| 3U | GVIPERAGGQGCAET | 130 |
| 3V | ERAGGQGCAETLRAQ | 131 |
| 3W | GQGCAETLRAQREKR | 132 |
| 3X | AETLRAQREKRAGFWL | 133 |
| 5A | PALLVAPRCALCCAA | 134 |
| 5B | VAPRCALCCAADTGR | 135 |
| 5C | CALCCAADTGRCGRW | 136 |
| 5D | CAADTGRCGRWQPLC | 137 |
| 5E | TGRCGRWQPLCGAWG | 138 |
| 5F | GRWQPLCGAWGPRAG | 138 |
| 5G | PLCGAWGPRAGGLCN | 140 |
| 5H | AWGPRAGGLCNPGTR | 141 |
| 5I | RAGGLCNPGTRRSTA | 142 |
| 5J | LCNPGTRRSTALWLPNA | 143 |

Pool 2

| | | |
|---|---|---|
| 408A | MDATVEPSGRRPAGL | 144 |
| 408B | VEPSGRRPAGLPAGT | 145 |
| 408C | GRRPAGLPAGTLCSL | 146 |
| 408D | AGLPAGTLCSLSSGA | 147 |
| 408E | AGTLCSLSSGAPQLC | 148 |
| 408F | CSLSSGAPQLCLPGV | 149 |
| 408G | SGAPQLCLPGVWVSP | 150 |
| 408H | QLCLPGVWVSPVPNL | 151 |
| 408I | PGVWVSPVPNLCHHG | 152 |
| 408J | VSPVPNLCHHGYLALCVR | 153 |
| 744A | MLSCPESGGGTPQAG | 154 |
| 744B | PESGGGTPQAGATNP | 155 |
| 744C | GGTPQAGATNPIRQI | 156 |
| 744D | QAGATNRIRQIMGAK | 157 |
| 744E | TNPIRQIMGAKSCSV | 158 |
| 744F | RQIMGAKSCSVPRGA | 159 |
| 744G | GAKSCSVPRGAYCRE | 160 |
| 744H | CSVPRGAYCRERFVF | 161 |
| 965A | MPFSSGHLLRPDISF | 162 |
| 965B | SGHLLRPDISFTPGE | 163 |
| 965C | LRPDISFTPGEMAKSV | 164 |
| 1214A | MQSANMSDSSGHIAG | 165 |
| 1214B | NMSDSSGHIAGFEQQTNR | 166 |

Pool 3

| | | |
|---|---|---|
| 1355A | MVFFGPVSARWCLLV | 167 |
| 1355B | GPVSARWCLLVSGVP | 168 |
| 1355C | ARWCLLVSGVPGTMS | 169 |
| 1355D | LLVSGVPGTMSAASLRT | 170 |
| 1970 | MSGQNILTLWGLLYWV | 171 |
| 2021A | MTSTGPGGPLCCVCV | 172 |
| 2021B | GPGGPLCCVCVLWTR | 173 |
| 2021C | PLCCVCVLWTRHPGC | 174 |
| 2021D | VCVLWTRHPGCTLLRQM | 175 |
| 2120 | MMPSPRVSWWRLLPI | 176 |
| 2204A | MQWSGEIAKAKSTSP | 177 |
| 2204B | GEIAKAKSTSPLGDR | 178 |
| 2204C | KAKSTSPLGDRSPPS | 179 |
| 2204D | TSPLGDRSPPSLTSS | 180 |
| 2204E | GDRSPPSLTSSHTWA | 181 |
| 2204F | PPSLTSSHTWASSLS | 182 |
| 2204G | TSSHTWASSLSICRI | 183 |
| 2204H | TWASSLSICRIQMPVH | 184 |
| 2375A | MRAAAACLTSSCTSCVTVS | 185 |
| 2558 | MGCFYVLLMTFCW | 186 |
| 2825A | MPRPQLRRASPSRVS | 187 |
| 2825B | QLRRASPSRVSSKLG | 188 |
| 2825C | ASPSRVSSKLGRPCG | 189 |
| 2825D | RVSSKLGRPCGTSSC | 190 |
| 2825E | KLGRPCGTSSCRSCG | 191 |
| 3240A | MSPGTSEDSPKTAVP | 192 |
| 3240B | TSEDSPKTAVPEAPR | 193 |
| 3240C | SPKTAVPEAPRGDNDHP | 194 |

[0545] TABLE 5

Human TERT Alternative Reading
Frame Polypeptides
(Derived from the polynucleotide
sequence presented herein as
SEQ ID NO: 4, Genbank Accession No. NM_003219)

| | |
|---|---|
| Sequence | SEQ ID NO: |

| | |
|---|---|
| RCRALPAAEPCAPCCAATTARCCRW | 195 |
| PRSCGAWGPRAGGWCSAGTRRLSAR | |
| WWPSAWCACPGTHGRPPPPPPSARC | |
| PA | |
| DAARSPLPSRALPAAQPLPRGAAAG | 196 |
| HVRAAPGAPGLAAGAARGPGGFPRA | |
| GGPVPGVRALGRTAAPRRPLLPPGV | |
| LPEGAGGPSAAEAVRARREERAGLR | |
| LRAAGRGPRGPPRGLHHQRAQLPAQ | |
| HGDRRTAGERGVGAAAAPRGRRRAG | |
| SPAGTLRALCAGGSQLRLPGVRAAA | |
| VPARRCHSGPAPATR | |
| MSRRPRFKRTGSFSTGRVSGASCKA | 197 |
| LESDST | |
| MPWSRRPPMGTSARPSRATSL | 198 |
| MPSSSSRAPP | 199 |
| MRPAVASSTSSYASCATTPCA | 200 |
| SGASPTSSARGSRRAPSSPRC | |
| SAACATATWRTSCLRGFGGTG | |
| CSCVWWMISCW | |
| MPGPPSEPVSPSTAASRLGGT | 201 |
| CVANSLGSCG | |
| MCAAAPISSASLEEPHIFPAR | 202 |
| HL | |

### EXAMPLE 4

### Human TrpP8 Alternative Reading Frame Polypeptides

[0546] This example discloses alternative reading frame polypeptides that were designed and synthesized based on the polynucleotide presented herein as SEQ ID NO: 8 (Genbank Accession No. NM_{—}024080) that encodes the amino acid sequence of human transient receptor potential cation channel 8 (hTrpP8) presented herein as SEQ ID NO: 7.

TABLE 6

Human TrpP8 Alternative Reading
Frame Polypeptides
(Derived from the polynucleotide
presented herein as
SEQ ID NO: 8, Genbank Accession No. NM_024080)

| | |
|---|---|
| Sequence | SEQ ID NO: |

| | |
|---|---|
| RCPFGQPGSA | 203 |
| DVLSGSQAQHEEQKE | 204 |
| MTLWTAPGPCTPARLGAQTCLTVKA | 205 |
| TW | |
| MCLLYQRFQGHGECVQVWLCPEPAH | 206 |
| GRHPDQPK | |
| MCASVAMPRASTWKAPRSTKVRNGT | 207 |
| TRNTPRNFLPTPLGIFSLRHWGRKGSIY | |
| VCPATRTRKSFTSC | |
| MELQETHQGISYRRLWGYSV | 208 |
| MTSQEIHCISWTTTTHICCSWTMAVM | 209 |
| DIPLSKQSSGIS | |
| MVARSPLCVLPKEVEKR | 210 |
| MAQRNSRMFSPINSY | 211 |
| MPSPTLYTKPSAPVSKTRITGMGS | 212 |
| MMRFSPMTADGSLLTFKKSCLRLS | 213 |
| MMSSLNSSPTTSARLCTGICRSPRIPIM | 214 |
| MPSSRLSGNWLRTSEEASGRKTEMAG | |
| TRWT | |
| MLLGSPRSWLMSTRPGLLSCSLSVTAA | 215 |
| MKTWQNSCWSIPVKLGVEATVWSWR | |
| WRPQTSISSPSLGSRIFFLSNGMERFPE | |
| TPRTGRLSCVCLLYPWWAVALYHLG | |
| RNLSTSTRSCFGTMWRSSPPPSWSSPG | |
| MWSSTSPSSCCLPTCCSWISIRCHTPPS | |
| WSCTRWSLSSSVMK | |
| MVWRDFPRHQELEDYPVSVYYTLGGL | 216 |
| WLCII | |
| MCSSSCSSLRCGWWPLAWPGKGSLGR | 217 |
| MSSAGGGYSVRSSTSPTWPCSARCPVT | |
| WMVPRMTLPTAPSLGMSPSHCVWSW | |
| MSTTCPGSPSGSPSPWCASTCYPPTSCW | |
| STCWSPCLATRWAPSRRTMTRSGSSRG | |
| TSWCRSTAAASISPSPSSSSLTSTWW | |
| MKTMRLWHGRVS | 218 |
| MGGCHEGKLPCQDQHKSQRHLRGNE | 219 |
| ASI | |

[0547] TABLE 7

Human TrpP8 Alternative Reading
Frame Polypeptide Pools
(Designed based upon exemplary
hTrpP8 ARF polypeptides,
SEQ ID NOs: 203-208, presented in Table 6)

| | | |
|---|---|---|
| Identifier | Sequence | NO: |

| | | |
|---|---|---|
| 2A | WRPFGQPGSA | 220 |
| 3A | GVLSGSRAQHEEQKE | 221 |
| 47A | MTLWTAPGPCTPARL | 222 |
| 47B | TAPGPCTPARLGAQT | 223 |
| 47C | PCTPARLGAQTCLTV | 224 |
| 47D | ARLGAQTCLTVKATW | 225 |
| 162A | MCLLYQRFQGHGECV | 226 |
| 162B | YQRFQGHGECVQVWL | 227 |
| 162C | QGHGECVQVWLCPEP | 228 |
| 162D | ECVQVWLCPEPAHGR | 229 |
| 162E | VWLCPEPAHGRHPDQ | 230 |
| 162F | PEPAHGRHPDQPK | 231 |
| 200A | MCASVAMPRASTWKA | 232 |
| 200B | VAMPRASTWKAPRST | 233 |
| 200C | RASTWKAPRSTKVRN | 234 |
| 200D | WKAPRSTKVRNGTTR | 235 |
| 200E | RSTKVRNGTTRNTPR | 236 |
| 200F | VRNGTTRNTPRNFLP | 237 |
| 200G | TTRNTPRNFLPTPLG | 238 |
| 200H | TPRNFLPTPLGIFSL | 239 |
| 200I | FLPTPLGIFSLRHWG | 240 |
| 200J | PLGIFSLRHWGRKGS | 241 |
| 200K | FSLRHWGRKGSIYVC | 242 |
| 200L | HWGRKGSIYVCPATR | 243 |
| 200M | KGSIYVCPATRTRKS | 244 |
| 200N | YVCPATRTRKSFTSC | 245 |
| 267A | MELQETHQGISYRRL | 246 |
| 267B | ETHQGISYRRLWGYSV | 247 |

### EXAMPLE 5

### Human PAP Alternative Reading Frame Polypeptides

[0548] This example discloses alternative reading frame polypeptides that were designed and synthesized based on the polynucleotide presented herein as SEQ ID NO: 10 (Genbank Accession No. M34840) that encodes the amino acid sequence of the human prostatic acid phosphatase (hPAP) variant presented herein as SEQ ID NO: 9 and the polynucleotide presented herein as SEQ ID NO: 12 (Genbank Accession No. X53605) that encodes the amino acid sequence of the hPAP variant presented herein as SEQ ID NO: 11.

TABLE 8

Human PAP Alternative Reading
Frame Polypeptides
(Derived from the polynucleotide
presented herein as
SEQ ID NO: 10, Genbank Accession No. M34840)

| | |
|---|---|
| Sequence | SEQ ID NO: |

| | |
|---|---|
| ELHPSSWPGQQALALASCFCFFSG | 248 |
| HESCTPPPGQGSKP | 249 |
| METEVPLTPFPLTP | 250 |
| MATRIWPTHPAGHGAAL | 251 |
| MSPINMNRFIFEAQTLTGL | 252 |
| MARTFLEFGVKSTTLYIVRVFTISL | 253 |
| YPPGPLRTP | |
| MEFTSRKRNLGSKGVSWSMKSSIT | 254 |
| MFTTDSFLPMLLAT | 255 |
| MRRSTSRIPSCYLAAALAVLWRGL | 256 |
| LSWLAL | |

[0549] TABLE 9

Human PAP Alternative Reading
Frame Polypeptide Pool
(Designed based upon the hPAP ARF
polypeptides presented in Table 8)

| | | |
|---|---|---|
| Identifier | Sequence | SEQ ID NO: |

| | | |
|---|---|---|
| 3A | ESCTPPPGQGSKP | 257 |
| 5A | ELHPSSWPGQQALAL | 258 |
| 5B | SSWPGQQALALASCF | 259 |
| 5C | GQQALALASCFCFFSG | 260 |
| 131A | METEVPLTPFPLTP | 261 |
| 186A | MATRIWPTHPAGHGAAL | 262 |
| 281A | MSPINMNRFIFEAQT | 263 |
| 281B | NMNRFIFEAQTLTGL | 264 |
| 593A | MARTFLEFGVKSTTL | 265 |
| 593B | FLEFGVKSTTLYIVR | 266 |
| 593C | GVKSTTLYIVRVFTI | 267 |
| 593D | TTLYIVRVFTISLYP | 268 |
| 593E | IVRVFTISLYPPGPL | 269 |
| 593F | FTISLYPPGPLRTP | 270 |
| 740A | MEFTSRKRNLGSKGV | 271 |
| 740B | SRKRNLGSKGVSWSM | 272 |
| 740C | NLGSKGVSWSMKSSIT | 273 |
| 902A | MFTTDSFLPMLLAT | 274 |
| 998A | MRRSTSRIPSCYLAA | 275 |
| 998B | TSRIPSCYLAAALAV | 276 |
| 998C | PSCYLAAALAVLWRG | 277 |
| 998D | LAAALAVLWRGLLSW | 278 |
| 998E | LAVLWRGLLSWLAL | 279 |

[0550] TABLE 10

Human PAP Alternative Reading
Frame Polypeptides
(Derived from the polynucleotide
presented herein as
SEQ ID NO: 12, Genbank Accession No. X53605)

| | |
|---|---|
| Sequence | SEQ ID NO: |

| | |
|---|---|
| ELHPSSWPGQQA | 280 |
| HESCTPPPGQGSKLSLCFLFLLFLL | 281 |
| ARPKCTSQGVEVCDFGVSAWTPKSH | |
| MDTEVPLTPFPLTP | 282 |
| MATKDLANSPSWHGAAL | 283 |
| MSPINMNRFIFEAQTLTGL | 284 |
| MARTFLEFGVKSTTLYIVRVFTISL | 285 |
| YPPGPLRTP | |
| MEFTSRKRNLGSKGVSWSMKSSIT | 286 |
| MFTTDSFLPMLLAT | 287 |
| MRRSTSRIPSCYLDAAPAVLWRGL | 288 |
| LSWLAL | |
| MQPQLSSGEVC | 289 |

### EXAMPLE 6

### Human CA9 Alternative Reading Frame Polypeptides

[0551] This example discloses alternative reading frame polypeptides that were designed and synthesized based on the polynucleotide presented herein as SEQ ID NO: 295 (Genbank Accession No. NM_{—}001216) that encodes the amino acid sequence of the human carbonic anhydrase IX (hCA9) presented herein as SEQ ID NO: 294.

TABLE 11

Human CA9 Alternative Reading
Frame Polypeptides
(Derived from the polynucleotide
presented herein as
SEQ ID NO: 295, Genbank
Accession No. NM_001216)

| | |
|---|---|
| Sequence | SEQ ID NO: |

| | |
|---|---|
| WLPCAPAPGSLC | 296 |
| GSPVPQPLAPSVDPGPCSRPHCATA | 297 |
| AVTAASDACPSPEVAPDAGGFPLGR | |
| RLFWGR | |
| MTHWARRICPVKRIHPERRIHPERR | 298 |
| IYLERRIYLERRIYLKLSLNQKKRAP | |
| MPTGTKKGMTRVIGAMEATRPGPGC | 299 |
| PQPARAASSPRWISAPSSPPSARPC | |
| APWNSWASSSRRSQNCACATMATVCN | |
| MSSCCLAWKKSLRKAQRLRSQDWTY | 300 |
| LHSCPLTSAATSNMRGL | |

### EXAMPLE 7

### Human CEA Alternative Reading Frame Polypeptides

[0552] This example discloses alternative reading frame polypeptides that were designed and synthesized based on the polynucleotide presented herein as SEQ ID NO: 302 (Genbank Accession No. M17303) that encodes the amino acid sequence of the human carcinoembryonic antigen (hCEA) presented herein as SEQ ID NO: 301.

TABLE 12

Human CEA Alternative Reading
Frame Polypeptides
(Derived from the polynucleotide
presented herein as
SEQ ID NO: 302, Genbank Accession No. M17303)

| | |
|---|---|
| Sequence | SEQ ID NO: |

| | |
|---|---|
| LLHRGGQSRQQRPWSLPRPLPTDGA | 303 |
| SPGRGSCSQPHF | |
| FSTEEDRADSRDHGVSLGPSPQMVH | 304 |
| PLAEAPAHSLTSNLLEPAHHCQAHY | |
| MVHPLAEAPAHSLTSNLLEPAHHCQ | 305 |
| AHY | |
| MSQRGRRCFYLSTICPSIFLATAGT | 306 |
| KVKIEWMATVKL | |
| MTQDSTPYTS | 307 |
| MKKQLASSGYTRSCPSPPSPATTPN | 308 |
| PWRTRMLWPSPVNLRLRTQPTCGG | |
| MATGPSLYSMSQEMTQQATNVKPRTQ | 309 |
| MSSMARMPPPFPL | 310 |
| MQPLTHLHSTLGLSMGLSSNPPKSS | 311 |
| LSPTSL | |
| MQSHPNPSSPATTPTPWRMRML | 312 |
| MTTGPSLYSVSQGMM | 313 |
| MSSMAQTTPPFPPHTPITVQG | 314 |
| MQPLTHLHSILG | 315 |
| MGTSSNTHKSSLSPTSLRRTADSIP | 316 |
| ARPITQPVATAGLQSRQSQSLRSCP | |
| SPPSPATTPNPWRTRMLWPSPVNLR | |
| LRTQPTCGG | |
| MVRASQSVPGCSCPMATGPSLYSMS | 317 |
| QEMTQEPMYVESRTQ | |
| MWNPELSECKPQ | 318 |
| MSSMGRTPPSFPPQTRLTFRERTST | 319 |
| SPATRPLTHPRSILGVSMGYRSNTH | |
| KFSLSPKSRQIITGPMPVLSLTWLL | |
| AAIIP | |

### EXAMPLE 8

### Human PSMA Alternative Reading Frame Polypeptides

[0553] This example discloses alternative reading frame polypeptides that were designed and synthesized based on the polynucleotide presented herein as SEQ ID NO: 345 (Genbank Accession No. NM_{—}004467) that encodes the amino acid sequence of the human prostate-specific membrane antigen (hPSMA) presented herein as SEQ ID NO: 344.

TABLE 13

Human PSMA Alternative Reading
Frame Polypeptides
(Derived from the polynucleotide
presented herein as
SEQ ID NO: 345, Genbank
Accession No. NM_004467)

| | |
|---|---|
| Sequence | SEQ ID NO: |

| | |
|---|---|
| CGISFTKPTRLWPPRAARAGCALGR | 350 |
| WCWRVASFSSASSSGGL | |
| VESPSRNRLGCGHRAPPALAVRWGA | 351 |
| GAGGWLLSPRLPLRVVYKILQ | |
| MKLLTLLQSII | 352 |
| MMSCCPTQIRLIPTTSQ | 353 |
| MKMEMRFSTHHYLNHLLQDMKMFRI | 354 |
| LYHLSVLSLLKECQRAI | |
| MLTMHELKTSLNWNGT | 355 |
| MGKFSEEIRLKMPSWQGPKESFSTP | 356 |
| TLLTTLLLG | |
| MVGIFLEVVSSVEIS | 357 |
| MVQETLSHQVTQQMNMLIGVELQRLL | 358 |
| VFQVFLFIQLDTMMHRSS | |
| MLDLALLETFLHKKSRCTSTLPMK | 359 |
| MSFWEVTGTHGCLVVLTLRVEQLLFM | 360 |
| KL | |
| MQKNLVFLVLLSGQRRIQDSFKSVAWL | 361 |
| ILMLTHL | |
| MKALKANLFMKVGLKKVLPQSSVACPG | 362 |
| MILRCSSNDLELLQAEHGILKIGKQTNSA | 363 |
| AIHCITVSMKHMSWWKSFMIQCLNITSL | |
| WPRFEEGWCLS | |
| MLTKSTVFL | 364 |
| MINSCFWKEHLLIH | 365 |
| MSSMLQAATTSMQGSHSQEFMMLCL | 366 |
| ILKAKWTLPRPGEK | |
| MLQPSQCRQLQRL | 367 |

### EXAMPLE 9

### Human PSA Alternative Reading Frame Polypeptides

[0554] This example discloses alternative reading frame polypeptides that were designed and synthesized based on the polynucleotide presented herein as SEQ ID NO: 369 (Genbank Accession No. M26663) that encodes the amino acid sequence of the human prostate-specific antigen (hPSA) presented herein as SEQ ID NO: 368.

TABLE 14

Human PSA Alternative Reading
Frame Polypeptides
(Derived from the polynucleotide
presented herein as
SEQ ID NO: 369, Genbank Accession No. M26663)

| | |
|---|---|
| Sequence | SEQ ID NO: |

| | |
|---|---|
| CGSRLSSSPCP | 374 |
| VGPGCLPHPVRDVDWCCTPHPVSDC | 375 |
| GRLGVREAFPTLAGACGLSWQGSLR | |
| RCSGAPPVGPHSCPLHQEQKRDLAG | |
| SAQPVSS | |
| MTPATTSCCSACQSLPSSRML | 376 |
| MLFPMTCVRKFTLRR | 377 |
| MVCFKVSRHGAVNHVPCPKGLPCTPR | 378 |
| WCITGSGSRTPSWPTP | |
| MCPARKAFPVHQGGALPEVDQGHHR | 379 |
| GQP | |

### EXAMPLE 10

### Human P53 Alternative Reading Frame Polypeptides

[0555] This example discloses alternative reading frame polypeptides that were designed and synthesized based on the polynucleotide presented herein as SEQ ID NO: 381 (Genbank Accession No. M14695) that encodes the amino acid sequence of the human p53 cellular tumor antigen (hp53) presented herein as SEQ ID NO: 380.

TABLE 15

Human p53 Alternative Reading
Frame Polypeptides
(Derived from the polynucleotide
presented herein as
SEQ ID NO: 381, Genbank Accession No. M14695)

| | |
|---|---|
| Sequence | SEQ ID NO: |

| | |
|---|---|
| WRSRSQILASSPL | 386 |
| MKLPECQRLLPPWPLHQRLLHRRPL | 387 |
| HQPPPGPCHLLSLPRKPTRAATVSV | |
| WASCILGQPSL | |
| MSAAQIAMVWPLLSILSEWKEICVW | 388 |
| SIWMTETLFDIVWWCPMSRLRLALT | |
| VPPSTTTTCVTVPAWAA | |
| MENISPFRSVGVSASRCSES | 389 |
| MRPWNSRMPRLGRSQGGAGLTPAT | 390 |

### EXAMPLE 11

### Human PGY1 Alternative Reading Frame Polypeptides

[0556] This example discloses alternative reading frame polypeptides that were designed and synthesized based on the polynucleotide presented herein as SEQ ID NO: 392 (Genbank Accession No. M14758) that encodes the amino acid sequence of the human P-glycoprotein or multi drug resistant protein 1 (hPGY1 or hMDR1) presented herein as SEQ ID NO: 391.

TABLE 16

Human PGY1 Alternative Reading
Frame Polypeptides
(Derived from the polynucleotide
presented herein as
SEQ ID NO: 392, Genbank Accession No. M14758)

| | |
|---|---|
| Sequence | SEQ ID NO: |

| | |
|---|---|
| WILKGTAMEEQRRRTFLN | 397 |
| MPIITVELVLGCWLLLTFRFHFGAW | 398 |
| QLEDKYTKLENSFFML | |
| MCTMLGSLTPDLQMMSLRLMKLLVT | 399 |
| KLECSFSQWQHFSLGL | |
| MHLMLWPSGMGPPWSSQGNILLDKY | 400 |
| SLYSFLY | |
| MQEEQLMKSSR | 401 |
| MFTSVTHLEKKLRS | 402 |
| MTPQRGWSVLMDRILGP | 403 |
| MAVKMSPWMRLRKLSRKPMPMTLS | 404 |
| MRPRQPWTQKAKQWFRWLWIRPEKV | 405 |
| GPPL | |
| MLTSSLVSMMESLWRKEIMMNS | 406 |
| MQLMNPKVKLMPWKCLQMIQDPV | 407 |
| MKVYLQFPFGGL | 408 |
| MALFCCWCILCHYKWRPATSICNNI | 409 |
| FKDYRGFYKN | |
| MEACNQHLQ | 410 |
| MILKQNDRIVTCFHYCF | 411 |
| MTLKTPLEH | 412 |
| MMLLKLKGL | 413 |
| MLRVCRYHTETL | 414 |
| MLDVSGLEPTWWHINS | 415 |
| MFPVWSLLGGT | 416 |
| MPKPKYQQPTSS | 417 |
| MSHLVKLYSTIPPDRTSQCFRD | 418 |
| MFSGSEHTWASCPRSPSCLTAALLR | 419 |
| TLPMETTAGWCHRKRS | |
| MPSSSHCLINIALK | 420 |
| MKPRQLWIQKVKRLSKKPWTKPEKAA | 421 |
| PAL | |
| MAESRSMARISSCWHRKASIFQWSVS | 422 |
| RLEQSAS | |

### EXAMPLE 12

### Human AFP Alternative Reading Frame Polypeptides

[0557] This example discloses alternative reading frame polypeptides that were designed and synthesized based on the polynucleotide presented herein as SEQ ID NO: 424 (Genbank Accession No. NM_{—}001134) that encodes the amino acid sequence of the human alpha-fetoprotein (hAFP) presented herein as SEQ ID NO: 423.

TABLE 17

Human AFP Alternative Reading
Frame Polypeptides
(Derived from the polynucleotide
presented herein as
SEQ ID NO: 424, Genbank
Accession No. NM_001134)

| | |
|---|---|
| Sequence | SEQ ID NO: |

| | |
|---|---|
| EVGGINFFNFPTKFY | 429 |
| MRKKFWRSTDIQTAAAKVKREDITV | 430 |
| FLHTKSPLQHRSHFSKFQNLSQAVKH | |
| MKKTGRHS | |
| MHLQFFFGLLAMTK | 431 |
| MQLNASKQRQQQLQKN | 432 |
| MLPNKGSNSYKRIKRKQLVKSTCMC | 433 |
| SNEKFWDPNFPSHNCY | |
| MWPMYMSTVAEEMCWIVCRMGKKSC | 434 |
| PTYVLNKTLCQTK | |
| MFSTRHSVKQNNRMLQTDHAGTWSM | 435 |
| YNSCRK | |
| MQKMMKNLKVYLQI | 436 |
| MNIQEDILSLLSQ | 437 |
| MRFSLLTQRKPPS | 438 |
| MPTGGHASAAWWWMKHMSLLHSLMT | 439 |
| SSFSIRICAKLRV | |

### EXAMPLE 13

### Human MUC1 Alternative Reading Frame Polypeptides

[0558] This example discloses alternative reading frame polypeptides that were designed and synthesized based on the polynucleotide presented herein as SEQ ID NO: 441 (Genbank Accession No. AF125525) that encodes the amino acid sequence of the human mucin precursor (hMUC1) presented herein as SEQ ID NO: 440.

TABLE 18

Human MUC1 Alternative Reading
Frame Polypeptides
(Derived from the polynucleotide
presented herein as
SEQ ID NO: 441, Genbank Accession No. AF125525)

| | |
|---|---|
| Sequence | SEQ ID NO: |

| | |
|---|---|
| DTGHPVSFLPAAAPHSAYRFWSCKL | 446 |
| YPRWRKGDFGYPEKFSAQLY | |
| HRAPSLLSSCCCSSQCLQVLVMQAL | 447 |
| PQVEKRRLRLPREVQCPALLRRMLL | |
| IPLWKIPAPTTTKSCRETFLKCFCRF | |
| INKGVFWASPILSSGQDLWWYN | |
| MSTTWRHSSISIKRKQPLDIT | 448 |
| MCHFLSLPSLGLGCQAGASRCWCWS | 449 |
| VFWLRWPLSISLPWLSVSAAERTTGS | |
| WTSFQPGIPTIL | |
| MGAMCPLAVPIVAPMRRFLQVMVAA | 450 |
| ASLTQTQQWQPLLPTC | |

### EXAMPLE 14

### Human Frame Alternative Reading Frame Polypeptides

[0559] This example discloses alternative reading frame polypeptides that were designed and synthesized based on the polynucleotide presented herein as SEQ ID NO: 452 (Genbank Accession No. U65011) that encodes the amino acid sequence of the human preferentially expressed antigen of melanoma (hPRAME) presented herein as SEQ ID NO: 451.

TABLE 19

Human PRAME Alternative Reading
Frame Polypeptides
(Derived from the polynucleotide
presented herein as
SEQ ID NO: 439, Genbank Accession No. U65011)

| | |
|---|---|
| Sequence | SEQ ID NO: |

| | |
|---|---|
| WNEGVCGVPFRADTSA | 457 |
| GTKAFVGFHSEPIHQHECVDKPTETC | 458 |
| GAGRAEPAEG | |
| MRPWPLPPWSCCPGSSSRHSSWQPL | 459 |
| TGDTARP | |
| MDLMCSLPRRFAPGGGNFKCWIYGRT | 460 |
| LIRTSGLYGLETGPVCTHFQSQKQLSP | |
| MVWKQGQSVLISRARSSSAHDKEAK | 461 |
| SRWFEHRGRAALHSSRGARRLPVPQG | |
| RCL | |
| MNCSPTSLRK | 462 |
| MYYACAVRS | 463 |
| MHLPTFPRRRKSSISPSSPLSSSVC | 464 |
| SACRLSMWTLYFSLEAAWISCSGT | |
| MSVGSRMISSLPSCLP | 465 |
| MRTSMVPSTWRGLPICMPGSGSCCV | 466 |
| SWGGPAWSGLVPTPVLTVGTEPSMTR | |
| SPSCAPVSCLT | |

### EXAMPLE 15

### Human EPHA3 Alternative Reading Frame Polypeptides

[0560] This example discloses alternative reading frame polypeptides that were designed and synthesized based on the polynucleotide presented herein as SEQ ID NO: 468 (Genbank Accession No. AF213459) that encodes the amino acid sequence of the human ephrin receptor (hEPHA3) presented herein as SEQ ID NO: 467.

TABLE 20

Human EPHA3 Alternative Reading
Frame Polypeptides
(Derived from the polynucleotide
presented herein as
SEQ ID NO: 455, Genbank Accession No. AF213459)

| | |
|---|---|
| Sequence | SEQ ID NO: |

| | |
|---|---|
| WIVSSPSSSFSAALFSTASGN | 473 |
| GLSALHPPPSQLLCSRQLRGTDSAAFQ | 474 |
| MWSSSSLYETAIAFHWF | 475 |
| MKVSLKWILGTVF | 476 |
| MLVLVLPWCL | 477 |
| MACTHWQVFLQCWL | 478 |
| MLAMKKEVLCAKLVDQVSTRHWMVI | 479 |
| MLPSTSYVKNVGGI | 480 |
| MQPKCPLPPSTVWTHQHHGDSDRPSGTY | 481 |
| MSASSLDSLDSPTPR | 482 |
| MGSYWTTRSNTMKSRNKKQVIPF | 483 |
| MLPSVASSLTLYTYSKSEPEQPLDM | 484 |
| GRTAASLSLKLVQTLSPSLVKVAKWS | |
| MGQMKKDFILAMGI | 485 |
| MLTHIHMKTLPKLFMSLPRNWMPPT | 486 |
| YPLIKLLEQVNLERCAVVA | |
| MVPWIVSYVNTMPSLLSFS | 487 |
| MFTETSLLGTS | 488 |
| MTQKLLIQQEEGRSQSGGHHQKL | 489 |
| MYGVMGLFSGR | 490 |
| MELWDCSLGGDVLWRETILGDVQSGCN | 491 |
| MERDHTGRCPIRM | 492 |
| MRAIDCHPPWTAQLPCIS | 493 |
| MWISLPSAQQVTGLMVSGQHTARKSS | 494 |
| RVWSTVLVTQ | |

### EXAMPLE 16

### Human PIN1 Alternative Reading Frame Polypeptides

[0561] This example discloses alternative reading frame polypeptides that were designed and synthesized based on the polynucleotide presented herein as SEQ ID NO: 496 (Genbank Accession No. U49070) that encodes the amino acid sequence of the human peptidyl-prolyl isomerase and essential mitotic regulator (hPIN1) presented herein as SEQ ID NO: 495.

TABLE 21

Human PIN1 Alternative Reading
Frame Polypeptides
(Derived from the polynucleotide
presented herein as
SEQ ID NO: 496, Genbank Accession No. U49070)

| | |
|---|---|
| Sequence | SEQ ID NO: |

| | |
|---|---|
| MWRTRRSCRPAGRSA | 501 |
| MGGRGEAAARLGEAHEPQLRPSVLL | 502 |
| QPHH | |

### EXAMPLE 17

### Human Base Alternative Reading Frame Polypeptides

[0562] This example discloses alternative reading frame polypeptides that were designed and synthesized based on the polynucleotide presented herein as SEQ ID NO: 504 (Genbank Accession No. AY180924) that encodes the amino acid sequence of the human BASE (hBASE) presented herein as SEQ ID NO: 503.

TABLE 22

Human BASE Alternative Reading
Frame Polypeptides
(Derived from the polynucleotide
presented herein as
SEQ ID NO: 504, Genbank
Accession No. AY180924)

| | |
|---|---|
| Sequence | SEQ ID NO: |

| | |
|---|---|
| AECLRPLCSPLWAACLILCTGGPGWS | 509 |
| FFPAP | |
| MSPASLFSSVGCLSHPLHRRSWLEFL | 510 |
| PSSLMI | |
| MVYQASWTSLDLHSPMRSTLLAYR | 511 |
| MSPSRAPLKERRPLYKYHSRLS | 512 |
| MSLPLGTAGSCPRLFGSKLESNSPQR | 513 |
| KICCGKH | |

### EXAMPLE 18

### Human PSCA Alternative Reading Frame Polypeptides

[0563] This example discloses alternative reading frame polypeptides that were designed and synthesized based on the polynucleotide presented herein as SEQ ID NO: 515 (Genbank Accession No. AF043498) that encodes the amino acid sequence of the human prostate stem cell antigen (hPSCA) presented herein as SEQ ID NO: 514.

TABLE 23

Human PSCA Alternative Reading
Frame Polypeptides
(Derived from the polynucleotide
presented herein as
SEQ ID NO: 515, Genbank
Accession No. AF043498)

| | |
|---|---|
| Sequence | SEQ ID NO: |

| | |
|---|---|
| EGCAACPVDGRLGPAARHCPAVLLL | 520 |
| QSPGEQRGLPAGGELHPAGGAVLDR | |
| AHPRSWPPDRHQQRLQLELRG | |
| MTHRTTTWARRTSRAVTPTCATPAG | 521 |
| PMPCSRLPPSLRCSLHSACCSGDPAS | |

### EXAMPLE 19

### Human SURVIVIN Alternative Reading Frame Polypeptides

[0564] This example discloses alternative reading frame polypeptides that were designed based on the polynucleotide presented herein as SEQ ID NO: 549 (Genbank Accession No. AF077350) that encodes the amino acid sequence of the human SURVIVIN (hSURVIVIN) presented herein as SEQ ID NO: 550. The “full-length” rf1 protein sequence is presented herein as SEQ ID NO: 553, which is encoded by the polynucleotide sequence presented herein as SEQ ID NO: 554. The “full-length” rf2 protein sequence is presented herein as SEQ ID NO: 555, which is encoded by the polynucleotide sequence presented herein as SEQ ID NO: 556.

TABLE 24

Human SURVIVIN Alternative
Reading Frame Polypeptides
(Derived from the polynucleotide
presented herein as
SEQ ID NO: 549, Genbank
Accession No. AF077350)

| | |
|---|---|
| Sequence | SEQ ID NO: |

| | |
|---|---|
| WVPRRCPLPGSPFSRTTASLHSRTG | 551 |
| PSWRAAPAPRSGWPRLASSTAPLRT | |
| SQTWPSVSSASRSWKAGSQMTTP | |
| GCPDVAPCLAALSQGPPHLYIQELA | 552 |
| LLGGLRLHPGADGRGWLHPLPH | |
| MWVPRRCPLPGSPFSRTTASLHSRT | 553 |
| GPSWRAAPAPRSGWPRLASSTAPLR | |
| TSQTWPSVSSASRSWKAGSQMTTPR | |
| NIKSIRPVALSFLSRSSLKNNWTEK | |
| EPRTKLQRKPTIRRKNLRKLRRKCA | |
| VPSSSWLPWI | |
| MGCPDVAPCLAALSQGPPHLYIQEL | 555 |
| ALLGGLRLHPGADGRGWLHPLPHER | |
| ARLGPVFLLLQGAGRLGARKAFVRL | |
| RFPFCQEAVIFETGQRKSQEQNCKG | |
| NQQGNCEESAPCHRAAGCHGL | |

### EXAMPLE 20

### Human WTI Alternative Reading Frame Polypeptides

[0565] This example discloses alternative reading frame polypeptides that were designed based on the polynucleotide presented herein as SEQ ID NO: 557 (Genbank Accession No. NM_{—}000378) that encodes the amino acid sequence of the human WTI (hWTI) presented herein as SEQ ID NO: 558. The “full-length” rf1 protein sequence is presented herein as SEQ ID NO: 562, which is encoded by the polynucleotide sequence presented herein as SEQ ID NO: 563. The “full-length” rf2 protein sequence is presented herein as SEQ ID NO: 564, which is encoded by the polynucleotide sequence presented herein as SEQ ID NO: 565.

TABLE 25

Human WTI Alternative Reading
Frame Polypeptides
(Derived from the polynucleotide
presented herein as
SEQ ID NO: 557, Genbank
Accession No. NM_000378)

| | |
|---|---|
| Sequence | SEQ ID NO: |

| | |
|---|---|
| GLRRAGPERAAARRPLPGWRRRLCP | 559 |
| ACERRGAVGAGAGLCAPGRFGLRVV | |
| GRPRAATGSAATPAAAASLLHQTGA | |
| ELGRRGAARGAVPERLHCPLFRPVH | |
| WHSRSLSLRALRSSSAQPGVIRPGQ | |
| DVS | |
| MRRSSPTTHSSMRIPWASRARWVSS | 560 |
| STRCRPRSMAATPPPTAAPAARLCC | |
| MHDLESDELRSHLKGPQHRVRER | 561 |
| MWAPTCGTTRCCPPSPPWVAAAAVP | 562 |
| CLAARRSGRRCWTLRPRALRLTGRW | |
| AAPRRHRLRRHPRRRRLTPSSNRSR | |
| AGAARSRTRSSAAPSLSTFPASSLA | |
| QPEPVATGPSVLLRPARRHPARPGC | |
| FLTRPTCPAASRASPLFAIRVTARS | |
| PSTGRPATVTRPRTMRRSSPTTHSS | |
| MRIPWASRARWVSSSTRCRPRSMAA | |
| TPPPTAAPAARLCCGRPTAVTIYTK | |
| RATAQGTRAITTQRPSSAEPNTEYT | |
| RTVSSEAFRMCDVCLEPRLLYGRHL | |
| RPVRNAPSCVLTQAAIRDILSCPTY | |
| RCTAGSTLVRNHTSVTSRTVNEGFL | |
| VQTSSKDTKGDIQVNHSSVKLVSES | |
| SPGPTTRPTPGLIQVKSPSAVGGQV | |
| VRKSLPGQMNSAITTCIRET | |
| MGLRRAGPERAAARRPLPGWRRRLC | 564 |
| PACERRGAVGAGAGLCAPGRFGLRV | |
| VGRPRAATGSAATPAAAASLLHQTG | |
| AELGRRGAARGAVPERLHCPLFRPV | |
| HWHSRSLSLRALRSSSAQPGVIRPG | |
| QDVSRALPAQLPREPARYSQSGLQH | |
| GHLRRDAQLRSHALAPCGAVPQPLI | |
| QAGSHGPAGLAGAAVLGAAPGLWLP | |
| HPHRQLHRQPGFAAEDALQQQFIPN | |
| DIPAMHDLESDELRSHLKGPQHRVR | |
| ERPHNAHPLRSPIQNTHARCLQRHS | |
| GCATCAWSSPDSCTVGIETPLHVCL | |
| PRLQAVPLTDAQQEAHWTKVFSFRP | |
| AQKTPKETYRCETIPVSLSAKVLPV | |
| RPPEDPHQDSYRKALQLSVAKLSEK | |
| VCPVRISPPSQHASEKHDQTPAGA | |

### EXAMPLE 21

### Human SGA-M1 Alternative Reading Frame Polypeptides

[0566] This example discloses alternative reading frame polypeptides that were designed based on the polynucleotide presented herein as SEQ ID NO: 566 (Genbank Accession No. AY192728) that encodes the amino acid sequence of the human SGA-M1 (hSGA-M1) presented herein as SEQ ID NO: 567. The “full-length” rf1 protein sequence is presented herein as SEQ ID NO: 575, which is encoded by the polynucleotide sequence presented herein as SEQ ID NO: 576. The “full-length” rf2 protein sequence is presented herein as SEQ ID NO: 577, which is encoded by the polynucleotide sequence presented herein as SEQ ID NO: 578.

TABLE 26

Human SGA-M1 Alternative Reading
Frame Polypeptides
(Derived from the polynucleotide
presented herein as
SEQ ID NO: 566, Genbank
Accession No. AY192728)

| | |
|---|---|
| Sequence | SEQ ID NO: |

| | |
|---|---|
| WRWRWRRWRRSSRPAAAGTSSCRMK | 568 |
| KSLEN | |
| GVGVGGAGGGRAGLRQPVPAVAE | 569 |
| MKKSLENLNRLQVMLLHLTAAFLQR | 570 |
| AQHILTTRMSLGFQSPHLTM | |
| MMKRRGPRLKLLSLWFLGEMRILWV | 571 |
| GMILMMLTS | |
| MGPFQDLVSL | 572 |
| MDPDCQVFHLFPWIF | 573 |
| MVSTGSGGCSLF | 574 |
| MWRWRWRRWRRSSRPAAAGTSSCRM | 575 |
| KKSLENLNRLQVMLLHLTAAFLQRA | |
| QHILTTRMSLGFQSPHLTMLQHCPV | |
| MMKRRGPRLKLLSLWFLGEMRILWV | |
| GMILMMLTSLFSWHSSLTGLGFSCL | |
| FAPLQLQEGMGPFQDLVSLLSGFPP | |
| ISLDILMVSTGSGGCSLFAFSCFSE | |
| DLSIMQKFGRCQKLSQISPGPEFSL | |
| F | |
| MGVGVGGAGGGRAGLRQPVPAVAEC | 577 |
| SSTLQQHFCRERSIFVWVSKAPILQ | |
| CSYNTAQLSYYPFGSWERWDFHVNF | |
| FHGIPLLDWVFPVFLPDHFSCRKVW | |
| GHFRIWSLSNMDPDCQVFHLFPWIF | |
| WSVLALVGVPCFRLSPVSQRIYQLC | |
| KSSEDARNFLKSPQDQSSLYL | |

### EXAMPLE 22

### Human RCAS1 Alternative Reading Frame Polypeptides

[0567] This example discloses alternative reading frame polypeptides that were designed based on the polynucleotide presented herein as SEQ ID NO: 579 (Genbank Accession No. AF006265) that encodes the amino acid sequence of the human RCAS1 (hRCAS1) presented herein as SEQ ID NO: 580. The “full-length” rf1 protein sequence is presented herein as SEQ ID NO: 588, which is encoded by the polynucleotide sequence presented herein as SEQ ID NO: 589. The “full-length” rf2 protein sequence is presented herein as SEQ ID NO: 590, which is encoded by the polynucleotide sequence presented herein as SEQ ID NO: 591.

TABLE 27

Human RCAS1 Alternative Reading
Frame Polypeptides
(Derived from the polynucleotide
presented herein as
SEQ ID NO: 579, Genbank
Accession No. AF006265)

| | |
|---|---|
| Sequence | SEQ ID NO: |

| | |
|---|---|
| WPSPSFGYLNFVPA | 581 |
| MQIWQRTEIKWRPNNFANYS | 582 |
| MLKSGLPGMKMHPPV | 583 |
| MGMWQHNKILWNNWNLTILRT | 584 |
| MGAQVSLVD | 585 |
| MHGKKKKMQPGKQKKF | 586 |
| MGRRRRCSLASRRSSETAETSRQRK | 587 |
| ESSRTTKEENGKGSTTANEEGTKQN | |
| WCETFI | |
| MWPSPSFGYLNFVPAYADLAEDGNL | 588 |
| CQLQLIIHQFLSRQMLKSGLPGMKM | |
| HPPVRSKEGMGMWQHNKILWNNWNL | |
| TILRTHQLLGKLRKLLLRRENHILA | |
| SQMGAQVSLVDQLHKICLLFISLLN | |
| IPGRKIPMHGKKKKMQPGKQKKFQT | |
| EKREQPNNKGRKWKRKHNG | |
| MGHHPVSVIILYLPSNSILIPKEIN | 590 |
| MQIWQRTEIKWRPMNNFANYSRCTH | |
| QCKDRRREWECGNTTKFFGTTGTEE | |
| RTIEFWHPRWEHRFLISSYTRSAFY | |
| SSVFLRYLAGKYQCMGRRRRCSLAS | |
| RRSSETAETSRQRKESSRTTKEENG | |
| KGSTTANEEGTKQNWCETFI | |

### EXAMPLE 23

### Human CYP1B1 Alternative Reading Frame polypeptides

[0568] This example discloses alternative reading frame polypeptides that were designed based on the polynucleotide presented herein as SEQ ID NO: 592 (Genbank Accession No. NM_{—}000104) that encodes the amino acid sequence of the human CYP1B1 (hCYP1B1) presented herein as SEQ ID NO: 593. The “full-length” rf1 protein sequence is presented herein as SEQ ID NO: 599, which is encoded by the polynucleotide sequence presented herein as SEQ ID NO: 600. The “full-length” rf2 protein sequence is presented herein as SEQ ID NO: 601, which is encoded by the polynucleotide sequence presented herein as SEQ ID NO: 602.

TABLE 28

Human CYP1B1 Alternative Reading
Frame Polypeptides
(Derived from the polynucleotide
presented herein as
SEQ ID NO: 592, Genbank
Accession No. NM_000104)

| | |
|---|---|
| Sequence | SEQ ID NO: |

| | |
|---|---|
| WAPASARTTLGR | 594 |
| MASAPSTRPWCSRARPSPTGRPSPP | 595 |
| SVWCPAAAAWLSATTRSTGRCSGAQ | |
| PTA | |
| MCRLECRQNWIRSWGGTVCLVWVTS | 596 |
| PTCPMSWPSFMKPCASPALCLSLFL | |
| MPPLPTPLSWATTFPRTLWFLSTSG | |
| L | |
| MSLSESPWSSLIVLSKIYKPRKLAN | 597 |
| GHQPQPERPLAAKPAVHPADHAPAT | 598 |
| PVGAGHCACGPAAAEATEAAAPVRA | |
| PGPVCVATDRKRGGGGPGGSPLVRS | |
| PGAALRRRFPDPPGQLPHSGAEWRA | |
| RHPPGPGAAGLGLRRPAGLRLLPCG | |
| VRRPQHGFRPLLGALEGAAARSPQH | |
| DAQLLHAPAAQPPSPRGPRAERGAR | |
| AGGAAGARQRGRRLPRPEAADRRGR | |
| GQRHECRVFRLPLQPRRPRVP | |
| MWAPASARTTLGRTRCPSSRPRSCY | 599 |
| SCRCWPLCMWASGCGNGGGSSGPRP | |
| RARLRGHSETRRRWARRLTSRSLAW | |
| RGATATFSRSAWAAAPMASAPSTRP | |
| WCSRARPSPTGRPSPPSVWCPAAAA | |
| WLSATTRSTGRCSGAQPTACATSSR | |
| ASRAAAKSSRATCARRASWWRCWCA | |
| AARTAPSSTRGRVPCVSAAATATTT | |
| PSSVSCSATTKSSGARWARAAWWTC | |
| PGCSTSPTRCAPFSANSSSSTATSA | |
| TSSWTSSGTAKAFGPGPPPATWTPL | |
| SSLRKRRRPGTRTVVARGWIWRTYR | |
| PLSLTSSAPARTPCPPRCSGCSSSS | |
| PGILMCRLECRQNWIRSWGGTVCLV | |
| WVTSPTCPMSWPSFMKPCASPALCL | |
| SLFLMPPLPTPLSWATTFPRTLWFL | |
| STSGLSGLTRRTLIQLDSWTRMASS | |
| TRTFFQWAKGGALAKNFLRCSFFSS | |
| SPSWLTSAISGPTQMSLRKPLNPSH | |
| LKSMSLSESPWSSLIVLSKIYKPRK | |
| LAN | |
| MGHQPQPERPLAAKPAVHPADHAPA | 601 |
| TPVGAGHCACGPAAAEATEAAAPVR | |
| APGPVCVATDRKRGGGGPGGSPLVR | |
| SPGAALRRRFPDPPGQLPHSGAEWR | |
| ARHPPGPGAAGLGLRRPAGLRLLPC | |
| GVRRPQHGFRPLLGALEGAAARSPQ | |
| HDAQLLHAPAAQPPSPRGPRAERGA | |
| RAGGAAGARQRGRRLPRPEAADRRG | |
| RGQRHECRVFRLPLQPRRLPRVPAAQ | |
| PQRRVRAHGGRGQPGGRDALAAVLP | |
| QPGAHRFPRIRAAQPQLQQLHPGQV | |
| LEALRKPSARGRPPRHDGRLYPLCG | |
| KEGGRGLARWWRAAGFGERTGHYHH | |
| LRRQPGHPVHRAAVAAPPLHQVSCA | |
| DSSAGRIGSGRGEGPSALYGPAQPA | |
| LCPGLPLSHALLQLCACHYSSCHHC | |
| QHLCLGLPHSQGHCGFCQPVVCESS | |
| SSILGQGWPHQQGPDQQSDDFFSGQ | |
| KAVHWRRTFDAAFSLHLHPGSPVRF | |
| QGQPKACENEFQLWSNHSQCHSQRV | |
| HGAPCCPKFTSQGNLPI | |

### EXAMPLE 24

### Putative Alternative Reading Frame Peptides Based Upon the 5′ Untranslated Regions (UTRs) OF Various Human Tumor Associated Antigens (TAA)

[0569] This example discloses alternative reading frame polypeptides that were designed based on the polynucleotides of various human Tumor Associated Antigens presented herein. The 5′ UTR alternative reading frame peptides presented in Table 29 were designed in accordance with the following rules:

[0570] (1) Sequences downstream of the mRNA 5′ cap that encode open reading frames encoding 9 or more residues in all three (rf0, rf1, and rf2) registers. rf0 peptides are presented as “alternative” reading frame peptides because they do not comprise an element of the native full-length protein. The sequence downstream from the 5′ CAP is a convenient 5′ boundary for identifying ARF sequences of the present invention.

[0571] (2) A 5′ AUG initiation codon is not required for expression of 5′ ARF sequences. Ribosomes can be primed to initiate translation via alternative “AUG-like” codons that serve to initiate translation.

[0572] (3) The distance between the Cap 5′ UTR potential ARFs and the structural gene initiation AUG codon will vary from gene to gene.

[0573] (4) As a point of reference, number one is the A nucleotide of the canonical AUG and negative one is the nucleotide directly preceding the A of the canonical AUG.

TABLE 29

Alternative Reading Frame Polypeptides Designed
Based upon the 5′ Untranslated Regions
of Human Tumor Associated Antigens Disclosed Herein

| | | |
|---|---|---|
| Sequence | SEQ ID NO: | Description |

| | | |
|---|---|---|
| TCCATATTGTGCTTCCACCACTGCC | SEQ ID NO: 603 | Nucleotide sequence |
| AATAACAAAATAACTAGCAACC | | of hAFP (Genbank |
| | | Accession No. |
| | | NM_001134) 5′ UTR |
| HIVLPPLPITKLATM | SEQ ID NO: 604 | Amino acid sequence |
| | | of hAFP 5′ UTR |
| | | alternative reading |
| | | frame rf0 peptides |
| HIVLPPLPITK | SEQ ID NO: 605 | Amino acid sequence |
| | | of hAFP 5′ UTR |
| | | alternative reading |
| | | frame rf0 peptide A |
| SILCFHHCQQNNQP | SEQ ID NO: 606 | Amino acid sequence |
| | | of hAFP 5′ UTR |
| | | alternative reading |
| | | frame rf1 peptides |
| SILCFHHCQ | SEQ ID NO: 607 | Amino acid sequence |
| | | of hAFP 5′ UTR |
| | | alternative reading |
| | | frame rf1 peptide A |
| PYCASTTANNKITSNH | SEQ ID NO: 608 | Amino acid sequence |
| | | of hAFP 5′ UTR |
| | | alternative reading |
| | | frame rf2 peptide |
| GGCCAGAGTGTCTTGACAGCACACC | SEQ ID NO: 609 | Nucleotide sequence |
| AGAGAAATCCAGGGACCTGACCGAA | | of hBASE (Genbank |
| G | | Accession No. |
| | | AY180924) 5′ UTR |
| GQSVLTAHQRNPGTPKM | SEQ ID NO: 610 | Amino acid sequence |
| | | of hBASE 5′ UTR |
| | | alternative reading |
| | | frame rf0 peptides |
| GQSVLTAHQRNPGT | SEQ ID NO: 611 | Amino acid sequence |
| | | of hBASE 5′ UTR |
| | | alternative reading |
| | | frame rf0 peptide A |
| ARVSQHTREIQGPDRR | SEQ ID NO: 612 | Amino acid sequence |
| | | of hBASE 5′ UTR |
| | | alternative reading |
| | | frame rf1 peptides |
| QHTREIQGPDRR | SEQ ID NO: 613 | Amino acid sequence |
| | | of hBASE 5′ UTR |
| | | alternative reading |
| | | frame rf1 peptide A |
| PECLDSTPEKSRDLTED | SEQ ID NO: 614 | Amino acid sequence |
| | | of hBASE 5′ UTR |
| | | alternative reading |
| | | frame rf2 peptides |
| GCCCGTACACACCGTGTGCTGGGAC | SEQ ID NO: 615 | Nucleotide sequence |
| ACCCCACAGTCAGCCGC | | of hCA9 (Genbank |
| | | Accession No. |
| | | NM_001216) 5′ UTR |
| ARTHRVLGHPTVSR | SEQ ID NO: 616 | Amino acid sequence |
| | | of hCA9 5′ UTR |
| | | alternative reading |
| | | frame rf0 peptides |
| PVHTVCWDTPQSAA | SEQ ID NO: 617 | Amino acid sequence |
| | | of hCA9 5′ UTR |
| | | alternative reading |
| | | frame rf1 peptides |
| PYTPCAGTPHSQPH | SEQ ID NO: 618 | Amino acid sequence |
| | | of hCA9 5′ UTR |
| | | alternative reading |
| | | frame rf2 peptides |
| CGACCAGCAGACCAGACAGTCACAG | SEQ ID NO: 619 | Nucleotide sequence |
| CAGCCTTGACAAAACGTTCCTGGAA | | of hCEA (Genbank |
| CTCAAGCACTTCTCCACAGAGGAGG | | Accession No. |
| ACAGAGCAGACAGCAGAGACC | | M17303) 5′ UTR |
| RPADQTVTAALTKRSWNSSTSPQRR | SEQ ID NO: 620 | Amino acid sequence |
| TEQTAET | | of hCEA 5′ UTR |
| | | alternative reading |
| | | frame rf0 peptides |
| DQQTRQSQQPQNVPGTQALLHRGG | SEQ ID NO: 621 | Amino acid sequence |
| QSRQQRP | | of hCEA 5′ UTR |
| | | alternative reading |
| | | frame rf1 peptides |
| DQQTRQSQQP | SEQ ID NO: 622 | Amino acid sequence |
| | | of hCEA 5′ UTR |
| | | alternative reading |
| | | frame rf1 peptide A |
| QNVPGTQALLHRGGQSRQQRP | SEQ ID NO: 623 | Amino acid sequence |
| | | of hCEA 5′ UTR |
| | | alternative reading |
| | | frame rf1 peptide B |
| TSRPDSHSSLDKTFLELKHFSTEED | SEQ ID NO: 624 | Amino acid sequence |
| RADSRDH | | of hCEA 5′ UTR |
| | | alternative reading |
| | | frame rf2 peptides |
| ACTCTGGAGTGGGAGTGGGAGCGAG | SEQ ID NO: 625 | Nucleotide sequence |
| CGCTTCTGCGACTCCAGTTGTGAGA | | of hCYP1B1 |
| GCCGCAAGGGCATGGGAATTGACGC | | (Genbank Accession |
| CACTCACCGACCCCCAGTCTCAATC | | No. NM_000104) 5′ |
| TCAACGCTGTGAGGAAACCTCGACT | | UTR |
| TTGCCAGGTCCCCAAGGGCAGCGGG | | |
| GCTCGGCGAGCGAGGCACCCTTCTC | | |
| CGTCCCCATCCCAATCCAAGCGCTC | | |
| CTGGCACTGACGACGCCAAGAGACT | | |
| CGAGTGGGAGTTAAAGCTTCCAGTG | | |
| AGGGCAGCAGGTGTCCAGGCCGGGC | | |
| CTGCGGGTTCCTGTTGACGTCTTGC | | |
| CCTAGGCAAAGGTCCCAGTTCCTTC | | |
| TCGGAGCCGGCTGTCCCGCGCCACT | | |
| GGAAACCGCACCTCCCCGCAGC | | |
| TLEWEWERALLRLQLEPQGHGNR | SEQ ID NO: 626 | Amino acid sequence |
| HSPTPSLNLNAVRKPRLCQVPKGSG | | of hCYPB1 5′ UTR |
| ARRARHPSPSPSQSKRSWHRRQET | | alternative reading |
| RVGVKASSEGSRCPGRACGFLLTSC | | frame rf0 peptides |
| PRQRSQFLLGAGCPAPLETAPPRS | | |
| TLEWEWERALLRLQL | SEQ ID NO: 627 | Amino acid sequence |
| | | of hCYPB1 5′ UTR |
| | | alternative reading |
| | | frame rf0 peptide A |
| RHSPTPSLNLNAVRKPRLCQVPKGS | SEQ ID NO: 628 | Amino acid sequence |
| GARRARHPSPSPSQSKRSWH | | of hCYPB1 5′ UTR |
| | | alternative reading |
| | | frame rf0 peptide B |
| RRQETRVGVKASSEGSRCPGRACGF | SEQ ID NO: 629 | Amino acid sequence |
| LLTSCPRQRSQFLLGAGCPAPLETA | | of hCYPB1 5′ UTR |
| PPRS | | alternative reading |
| | | frame rf0 peptide C |
| LWSGSGSERFCDSSCESRKGMGIDA | SEQ ID NO: 630 | Amino acid sequence |
| THRPPVSISTLGNLDFARSPRAAG | | of hCYPB1 5′ UTR |
| LGERGTLLRPHPNPSAPGTDDAKRL | | alternative reading |
| EWELKLPVRAAGVQAGPAGSCRLA | | frame rf1 peptides |
| LGKGPSSFSEPAVPRHWKPHLPAA | | |
| LWSGSGSERFCDSSCESRKGMGIDA | SEQ ID NO: 631 | Amino acid sequence |
| THRPPVSISTL | | of hCYPB1 5′ UTR |
| | | alternative reading |
| | | frame rf1 peptide A |
| GNLDFARSPRAAGLGERGTLLRPHP | SEQ ID NO: 632 | Amino acid sequence |
| NPSAPGTDDAKRLEWELKLPVRAAG | | of hCYPB1 5′ UTR |
| VQAGPAGSC | | alternative reading |
| | | frame rf1 peptide B |
| RLALGKGPSSFSEPAVPRHWKPHLP | SEQ ID NO: 633 | Amino acid sequence |
| AA | | of hCYPB1 5′ UTR |
| | | alternative reading |
| | | frame rf1 peptide C |
| SGVGVGASASATPVVRAARAWELTP | SEQ ID NO: 634 | Amino acid sequence |
| LTDPQSQSQRCEETSTLPGPQGQRG | | of hCYPB1 5′ UTR |
| SASEAPFSVPIPIQALLALTTPRDS | | alternative reading |
| SGSSFQGQQVSRPGLRVPVDVLP | | frame rf2 peptides |
| AKVPVPSRSRLSRATGNRTSPQH | | |
| SGVGVGASASATPVVRAARAWELTP | SEQ ID NO: 635 | Amino acid sequence |
| LTDPQSQSQRCEETSTLPGPQGQRG | | of hCYPB1 5′ UTR |
| SASEAPFSVPIPIQALLALTTPRDS | | alternative reading |
| SGS | | frame rf2 peptide A |
| GQQVSRPGLRVPVDVLP | SEQ ID NO: 636 | Amino acid sequence |
| | | of hCYPB1 5′ UTR |
| | | alternative reading |
| | | frame rf2 peptide B |
| AKVPVPSRSRLSRATGNRTSPQH | SEQ ID NO: 637 | Amino acid sequence |
| | | of hCYPB1 5′ UTR |
| | | alternative reading |
| | | frame rf2 peptide C |
| CCCGCTCTGCTTCAGCGCACGCTGA | SEQ ID NO: 638 | Nucleotide sequence |
| AGACGGCACTAGGACCCAGGGAAGT | | of hEphA3 (Genbank |
| CCCCGAGCGGGGTTCGCGGAAAGGC | | Accession No. |
| AGCCAGACTCCTCCTTATCTCCAGT | | AF213459) 5′ UTR |
| GTCAAACTTGACATCAGCCTGCGAG | | |
| CGGAGCATGGTAACTTCTCCAGCAA | | |
| TCAGAGCGCTCCCCCTCACATCAGT | | |
| GGCATGCTTCATGGAGATATGCTCC | | |
| TCTCACTGCCCTCTGCACCAGCAAC | | |
| PALLQRTLKTALGPREVPERGSRKG | SEQ ID NO: 639 | Amino acid sequence |
| SQTPPYLQCQTHQPASGAWLLQQ | | of hEphA3 5′ UTR |
| SERSPSHQWHASWRYAPLTALCTSN | | alternative reading |
| | | frame rf0 peptides |
| PALLQRTLKTALGPREVPERGSRKG | SEQ ID NO: 640 | Amino acid sequence |
| SQTPPYLQCQT | | of hEphA3 5′ UTR |
| | | alternative reading |
| | | frame rf0 peptide A |
| LLQQSERSPSHQWHASWRYAPLTAL | SEQ ID NO: 641 | Amino acid sequence |
| CTSN | | of hEphA3 5′ UTR |
| | | alternative reading |
| | | frame rf0 peptide B |
| PLCFSARRRHDPGKSPSGVRGKA | SEQ ID NO: 642 | Amino acid sequence |
| ARLLLISSVKLDISLRAEHGNFSSN | | of hEphA3 5′ UTR |
| QSAPPHISGMLHGDMLLSLPSAPAT | | alternative reading |
| | | frame rf1 peptides |
| DPGKSPSGVRGKAARLLLISSVKLD | SEQ ID NO: 643 | Amino acid sequence |
| ISLRAEHGNFSSNQSAPPHISGMLH | | of hEphA3 5′ UTR |
| GDMLLSLPSAPAT | | alternative reading |
| | | frame rf1 peptide A |
| RSASAHAEDGTRTQGSPRAGFAERQ | SEQ ID NO: 644 | Amino acid sequence |
| PDSSLSPVSNLTSACERSMVTSPAI | | of hEphA3 5′ UTR |
| RALPLTSVACFMEICSSHCPLHQQH | | alternative reading |
| | | frame rf2 peptides |
| AATTCTCGAGCTCGTCGACCGGTCG | SEQ ID NO: 645 | Nucleotide sequence |
| ACGAGCTCGAGGGTCGACGAGCTCG | | of hHER2 (Genbank |
| AGGGCGCGCGCCCGGCCCCCACCCC | | Accession No. |
| TCGCAGCACCCCGCGCCCCGCGCCC | | M_11730) 5′ UTR |
| TCCCAGCCGGGTCCAGCCGGAGCCA | | |
| TGGGGCCGGAGCCGCAGTGAGCACC | | |
| NSRARRPVDELEGRRARGRAPGPHP | SEQ ID NO: 646 | Amino acid sequence |
| SQHPAPRALPAGSSRSHGAGAAVST | | of hHER2 5′ UTR |
| | | alternative reading |
| | | frame rf0 peptides |
| ILELVDRSTSSRVDELEGARPAPTP | SEQ ID NO: 647 | Amino acid sequence |
| RSTPRPAPSQPGPAGAMGPEPQAP | | of hHER2 5′ UTR |
| | | alternative reading |
| | | frame rf1 peptides |
| ILELVDRSTSSRVDELEGARPAPTP | SEQ ID NO: 648 | Amino acid sequence |
| RSTPRPAPSQPGPAGAMGPEPQ | | of hHER2 5′ UTR |
| | | alternative reading |
| | | frame rf1 peptide A |
| FSSSSTGRRARGSTSSRARARPPPL | SEQ ID NO: 649 | Amino acid sequence |
| AAPRAPRPPSRVQPEPWGRSRSEHH | | of hHER2 5′ UTR |
| | | alternative reading |
| | | frame rf2 peptides |
| CCTACTCTATTCAGATATTCTCCAG | SEQ ID NO: 650 | Nucleotide sequence |
| ATTCCTAAAGATTAGAGATCATTTC | | of hMDR1 (Genbank |
| TCATTCTCCTAGGAGTACTCACTTC | | Accession No. |
| AGGAAGCAACCAGATAAAAGAGAGG | | M_14758) 5′ UTR |
| TGCAACGGAAGCCAGAACATTCCTC | | |
| CTGGAAATTCAACCTGTTTCGCAGT | | |
| TTCTCGAGGAATCAGCATTCAGTCA | | |
| ATCCGGGCCGGGAGCAGTCATCTGT | | |
| GGTGAGGCTGATTGGCTGGGCAGGA | | |
| ACAGCGCCGGGGCGTGGGCTGAGCA | | |
| CAGCGCTTCGCTCTCTTTGCCACAG | | |
| GAAGCCTGAGCTCATTCGAGTAGCG | | |
| GCTCTTCCAAGCTCAAAGAAGCAGA | | |
| GGCCGCTGTTCGTTTCCTTTAGGTC | | |
| TTTCCACTAAAGTCGGAGTATCTTC | | |
| TTCCAAGATTTCACGTCTTGGTGGC | | |
| CGTTCCAAGGAGCGCGAGGTCGGG | | |
| LLYSDILQIPKDRSFLILLGVLTS | SEQ ID NO: 651 | Amino acid sequence |
| GSNQIKERCNGSQNIPPGNSTCFAV | | of hMDR1 5′ UTR |
| SRGISIQSIRAGSSHLWGLAGQE | | alternative reading |
| QRRGVGAQRFALFATGSLSSFER | | frame rf0 peptides |
| LFQAQRSRGRCSFPLGLSTKVGVSS | | |
| SKISRLGGRSKEREVG | | |
| LLYSDILQIPKD | SEQ ID NO: 652 | Amino acid sequence |
| | | of hMDR1 5′ UTR |
| | | alternative reading |
| | | frame rf0 peptide A |
| RSFLILLGVLTSGSNQIKERCNGSQ | SEQ ID NO: 653 | Amino acid sequence |
| NIPPGNSTCFAVSRGISIQSIRAGS | | of hMDR1 5′ UTR |
| SHLW | | alternative reading |
| | | frame rf0 peptide B |
| LAGQEQRRGVG | SEQ ID NO: 654 | Amino acid sequence |
| | | of hMDR1 5′ UTR |
| | | alternative reading |
| | | frame rf0 peptide C |
| AQRFALFATGSLSSFE | SEQ ID NO: 655 | Amino acid sequence |
| | | of hMDR1 5′ UTR |
| | | alternative reading |
| | | frame rf0 peptide D |
| RLFQAQRSRGRCSFPLGLSTKVGVS | SEQ ID NO: 656 | Amino acid sequence |
| SSKISRLGGRSKEREVG | | of hMDR1 5′ UTR |
| | | alternative reading |
| | | frame rf0 peptide E |
| YSIQIFSRFLKIRDHFSFSEYSLQ | SEQ ID NO: 657 | Amino acid sequence |
| EATRKRGATEARTFLLEIQPVSQF | | of hMDR1 5′ UTR |
| LEESAFSQSGPGAVICGEADWLGRN | | alternative reading |
| SAGAWAEHSASLSLPQEAAHSSSG | | frame rf1 peptides |
| SSKLKEAEAAVRFLVFPLKSEYLL | | |
| PRFHVLVAVPRSARSG | | |
| YSIQIFSRFLKIRDHFSFS | SEQ ID NO: 658 | Amino acid sequence |
| | | of hMDR1 5′ UTR |
| | | alternative reading |
| | | frame rf1 peptide A |
| EYSLQEATR | SEQ ID NO: 659 | Amino acid sequence |
| | | of hMDR1 5′ UTR |
| | | alternative reading |
| | | frame rf1 peptide B |
| KRGATEARTFLLEIQPVSQFLEESA | SEQ ID NO: 660 | Amino acid sequence |
| FSQSGPGAVICGEADWLGRNSAGAW | | of hMDR1 5′ UTR |
| AEHSASLSLPQEA | | alternative reading |
| | | frame rf1 peptide C |
| AHSSSGSSKLKEAEAAVRFL | SEQ ID NO: 661 | Amino acid sequence |
| | | of hMDR1 5′ UTR |
| | | alternative reading |
| | | frame rf1 peptide D |
| VFPLKSEYLLPRFHVLVAVPRSARS | SEQ ID NO: 662 | Amino acid sequence |
| G | | of hMDR1 5′ UTR |
| | | alternative reading |
| | | frame rf1 peptide E |
| PTLFRYSPDSRLEIISHSPRSTHF | SEQ ID NO: 663 | Amino acid sequence |
| RKQPDKREVQRKPEHSSWKFNLFRS | | of hHER2 5′ UTR |
| FSRNQHSVNPGREQSSVVRLIGWAG | | alternative reading |
| TAPGRGLSTALRSLCHRKPELIRVA | | frame rf2 peptides |
| ALPSSKKQRPLFVSFRSFHSRSIF | | |
| FQDFTSWWPFQGARGRD | | |
| PTLFRYSPDS | SEQ ID NO: 664 | Amino acid sequence |
| | | of hHER2 5′ UTR |
| | | alternative reading |
| | | frame rf2 peptide A |
| RLEIISHSPRSTHFRKQPDKREVQR | SEQ ID NO: 665 | Amino acid sequence |
| KPEHSSWKFNLFRSFSRNQHSVNPG | | of hHER2 5′ UTR |
| REQSSVVRLIGWAGTAPGRGLSTAL | | alternative reading |
| RSLCHRKPELIRVAALPSSKKQRPL | | frame rf2 peptide B |
| FVSFRSFH | | |
| SRSIFFQDFTSWWPFQGARGRD | SEQ ID NO: 666 | Amino acid sequence |
| | | of hHER2 5′ UTR |
| | | alternative reading |
| | | frame rf2 peptide C |
| GTCCAGGAGCAGGTAGCTGCTGGGC | SEQ ID NO: 667 | Nucleotide sequence |
| TCCGGGGACACTTTGCGTTCGGGCT | | of hP53 (Genbank |
| GGGAGCGTGCTTTCCACGACGGTGA | | Accession No. |
| CACGCTTCCCTGGATTGGCAGCCAG | | M_14495) 5′ UTR |
| ACTGCCTTCCGGGTCACTGCC | | |
| XSRSRLLGSGDTLRSGWERAFHDG | SEQ ID NO: 668 | Amino acid sequence |
| DTLPWIGSQTAFRVTA | | of hP53 5′ UTR |
| | | alternative reading |
| | | frame rf0 peptides |
| LLGSGDTLRSGWERAFHDGDTLPWI | SEQ ID NO: 669 | Amino acid sequence |
| GSQTAFRVTA | | of hP53 5′ UTR |
| | | alternative reading |
| | | frame rf0 peptide A |
| PGAGSCWAPGTLCVRAGSVLSTTVT | SEQ ID NO: 670 | Amino acid sequence |
| RFPGLAARLPSGSLP | | of hP53 5′ UTR |
| | | alternative reading |
| | | frame rf1 peptides |
| VQEQVAAGLRGHFAFGLGACFPRR | SEQ ID NO: 671 | Amino acid sequence |
| HASLDWQPDCLPGHCH | | of hP53 5′ UTR |
| | | alternative reading |
| | | frame rf2 peptides |
| VQEQVAAGLRGHFAFGLGACFPRR | SEQ ID NO: 672 | Amino acid sequence |
| | | of hP53 5′ UTR |
| | | alternative reading |
| | | frame rf2 peptide A |
| HASLDWQPDCLPGHCH | SEQ ID NO: 673 | Amino acid sequence |
| | | of hP53 5′ UTR |
| | | alternative reading |
| | | frame rf2 peptide B |
| GCTTCAGGGTACAGCTCCCCCGCAG | SEQ ID NO: 674 | Nucleotide sequence |
| CCAGAAGCCGGGCCTGCAGCCCCTC | | of hPRAME |
| AGCACCGCTCCGGGACACCCCACCC | | (Genbank Accession |
| GCTTCCCAGGCGTGACCTGTCAACA | | No. U65011) 5′ UTR |
| GCAACTTCGCGGTGTGGTGAACTCT | | |
| CTGAGGAAAAACCATTTTGATTATT | | |
| ACTCTCAGACGTGCGTGGCAACAAG | | |
| TGACTGAGACCTAGAAATCCAAGCG | | |
| TTGGAGGTCCTGAGGCCAGCCTAAG | | |
| TCGCTTCAAA | | |
| LQGTAPPQPEAGPAAPQHRSGTPHP | SEQ ID NO: 675 | Amino acid sequence |
| LPRRDLSTATSRCGELSEEKPFLL | | of hPRAME 5′ UTR |
| LSDVRGNKLRPRNPSVGGPEASLS | | alternative reading |
| RFK | | frame rf0 peptides |
| LQGTAPPQPEAGPAAPQHRSGTPHP | SEQ ID NO: 676 | Amino acid sequence |
| LPRRDLSTATSRCGELSEEKPF | | of hPRAME 5′ UTR |
| | | alternative reading |
| | | frame rf0 peptide A |
| LLLSDVRGNK | SEQ ID NO: 677 | Amino acid sequence |
| | | of hPRAME 5′ UTR |
| | | alternative reading |
| | | frame rf0 peptide B |
| LRPRNPSVGGPEASLSRFK | SEQ ID NO: 678 | Amino acid sequence |
| | | of hPRAME 5′ UTR |
| | | alternative reading |
| | | frame rf0 peptide C |
| FRVQLPRSQKPGLQPLSTAPGHPTR | SEQ ID NO: 679 | Amino acid sequence |
| FPGVTCQQQLRGVVNSLRKNHFDYY | | of hPRAME 5′ UTR |
| SQTCVATSDDLEIQALEVLRPAV | | alternative reading |
| ASK | | frame rf1 peptides |
| FRVQLPRSQKPGLQPLSTAPGHPTR | SEQ ID NO: 680 | Amino acid sequence |
| FPGVTCQQQLRGVVNSLRKNHFDYY | | of hPRAME 5′ UTR |
| SQTCVATSD | | alternative reading |
| | | frame rf1 peptide A |
| DLEIQALEVLRPA | SEQ ID NO: 681 | Amino acid sequence |
| | | of hPRAME 5′ UTR |
| | | alternative reading |
| | | frame rf1 peptide B |
| ASGYSSPAARSRACSPSAPLRDTPP | SEQ ID NO: 682 | Amino acid sequence |
| ASQAPVNSNFAVWTLGKTILII | | of hPRAME 5′ UTR |
| TLRRAWQQVTETKSKRWRSGQPK | | alternative reading |
| SLQN | | frame rf2 peptides |
| ASGYSSPAARSRACSPSAPLRDTPP | SEQ ID NO: 683 | Amino acid sequence |
| ASQA | | of hPRAME 5′ UTR |
| | | alternative reading |
| | | frame rf2 peptide A |
| PVNSNFAVW | SEQ ID NO: 684 | Amino acid sequence |
| | | of hPRAME 5′ UTR |
| | | alternative reading |
| | | frame rf2 peptide B |
| GKTILIITLRRAWQQVTET | SEQ ID NO: 685 | Amino acid sequence |
| | | of hPRAME 5′ UTR |
| | | alternative reading |
| | | frame rf2 peptide C |
| CTCAAAAGGGGCCGGATTTCCTTCT | SEQ ID NO: 686 | Nucleotide sequence |
| CCTGGAGGCAGATGTTGCCTCTCTC | | of hPSMA (Genbank |
| TCTCGCTCGGATTGGTTCAGTGCAC | | Accession No. |
| TCTAGAAACACTGCTGTGGTGGAGA | | NM004476) 5′ UTR |
| AACTGGACCCCAGGTCTGGAGCGAA | | |
| TTCCAGCCTGCAGGGCTGATAAGCG | | |
| AGGCATTAGTGAGATTGAGAGAGAC | | |
| TTTACCCCGCCGTGGTGGTTGGAGG | | |
| GCGCGCAGTAGAGCAGCAGCACAGG | | |
| CGCGGGTCCCGGGAGGCCGGCTCTG | | |
| CTCGCGCCGAG | | |
| LKRGRISFSWRQMLPLSLARIGSVH | SEQ ID NO: 687 | Amino acid sequence |
| SRNTAVVEKLDPRSGANSSLQGA | | of hPSMA 5′ UTR |
| RHDERLYPAVVVGGRAVEQQHR | | alternative reading |
| RGSREAGSARAE | | frame rf0 peptides |
| LKRGRISFSWRQMLPLSLARIGSVH | SEQ ID NO: 688 | Amino acid sequence |
| SRNTAVVEKLDPRSGANSSLQG | | of hPSMA 5′ UTR |
| | | alternative reading |
| | | frame rf0 peptide A |
| ERLYPAVVVGGRAVEQQHRRGSREA | SEQ ID NO: 689 | Amino acid sequence |
| GSARAE | | of hPSMA 5′ UTR |
| | | alternative reading |
| | | frame rf0 peptide B |
| SKGAGFPSPGGRCCLSLSLGLVQCT | SEQ ID NO: 690 | Amino acid sequence |
| LETLLWWRNWTPGLERIPACRADKR | | of hPSMA 5′ UTR |
| GISEIERDFTPPWWLEGAQSSSTG | | alternative reading |
| AGPGRPALLAPR | | frame rf1 peptides |
| SKGAGFPSPGGRCCLSLSLGLVQCT | SEQ ID NO: 691 | Amino acid sequence |
| LETLLWWRNWTPGLERIPACRADKR | | of hPSMA 5′ UTR |
| GISETERDFTPPWWLEGAQ | | alternative reading |
| | | frame rf1 peptide A |
| SSSTGAGPGRPALLAPR | SEQ ID NO: 692 | Amino acid sequence |
| | | of hPSMA 5′ UTR |
| | | alternative reading |
| | | frame rf1 peptide B |
| QKGPDFLLLEADVASLSRSDWFSAL | SEQ ID NO: 693 | Amino acid sequence |
| KHCCGGETGPQVWSEFQPAGLISE | | of hPSMA 5′ UTR |
| ALVRLRETLPRRGGWRARSRAAAQA | | alternative reading |
| RVPGGRLCSRRD | | frame rf2 peptides |
| QKGPDFLLLEADVASLSRSDWFSAL | SEQ ID NO: 694 | Amino acid sequence |
| | | of hPSMA 5′ UTR |
| | | alternative reading |
| | | frame rf2 peptide A |
| KHCCGGETGPQVWSEFQPAGLISEA | SEQ ID NO: 695 | Amino acid sequence |
| LVRLRETLPRRGGWRARSRAAAQAR | | of hPSMA 5′ UTR |
| VPGGRLCSRRD | | alternative reading |
| | | frame rf2 peptide B |
| CGCAGCCTCCAAAGCCGCCTTCCTC | SEQ ID NO: 696 | Nucleotide sequence |
| AGGGAAATTTGCGTGACCTTACTGC | | of hRCAS1 (Genbank |
| CCTCCGTCTACAGGCCTTGTACCTC | | Accession No. |
| TCCAGGCCGATTTTTCCACAATTTA | | AF006265) 5′ UTR |
| AATCCCAGTTCACCTGGTATCCAGC | | |
| TCCAGCAACTTAGAGCGTTTCACGT | | |
| CACGCCGGGCGCCAGGCGTCGGCTT | | |
| GTATAACCTGAAAACGCTCCTGTTT | | |
| TTCTCATCTGTGCAGTGGGTTTTGA | | |
| TTCCCACC | | |
| QPPKPPSSGKFAPYCPPSTGLVPL | SEQ ID NO: 697 | Amino acid sequence |
| QADFSTIIPVHLVSSSSNLERFTS | | of hRCAS1 5′ UTR |
| RRAPGVGLYNLKTLLFFSSVQWVLI | | alternative reading |
| PT | | frame rf0 peptides |
| QPPKPPSSGKFA | SEQ ID NO: 698 | Amino acid sequence |
| | | of hRCAS1 5′ UTR |
| | | alternative reading |
| | | frame rf0 peptide A |
| PYCPPSTGLVPLQADFSTI | SEQ ID NO: 699 | Amino acid sequence |
| | | of hRCAS1 5′ UTR |
| | | alternative reading |
| | | frame rf0 peptide B |
| IPVHLVSSSSNLERFTSRRAPGVG | SEQ ID NO: 700 | Amino acid sequence |
| LYNLKTLLFFSSVQWVLIPT | | of hRCAS1 5′ UTR |
| | | alternative reading |
| | | frame rf0 peptide C |
| RSLQSRLPQGNLRDLTALRLQALYL | SEQ ID NO: 701 | Amino acid sequence |
| SRPIFPQFKSQFTWYPAPATSVSR | | of hRCAS1 5′ UTR |
| HAGRQASACITKRSCFSHLCSGF | | alternative reading |
| FPP | | frame rf1 peptides |
| RSLQSRLPQGNLRDLTALRLQALYL | SEQ ID NO: 702 | Amino acid sequence |
| SRPIFPQFKSQFTWYPAPAT | | of hRCAS1 5′ UTR |
| | | alternative reading |
| | | frame rf1 peptide A |
| SVSRHAGRQASACIT | SEQ ID NO: 703 | Amino acid sequence |
| | | of hRCAS1 5′ UTR |
| | | alternative reading |
| | | frame rf1 peptide B |
| KRSCFSHLCSGF | SEQ ID NO: 704 | Amino acid sequence |
| | | of hRCAS1 5′ UTR |
| | | alternative reading |
| | | frame rf1 peptide C |
| AASKAAFLREICVTLLPSVYRPCTS | SEQ ID NO: 705 | Amino acid sequence |
| PGRFFHNLNPSSPGIQLQQLRAFHV | | of hRCAS1 5′ UTR |
| TPGARRRLVPENAPVFLICAVGFD | | alternative reading |
| SHH | | frame rf2 peptides |
| AASKAAFLREICVTLLPSVYRPCTS | SEQ ID NO: 706 | Amino acid sequence |
| PGRFFHNLNPSSPGIQLQQLRAFHV | | of hRCAS1 5′ UTR |
| TPGARRRLV | | alternative reading |
| | | frame rf2 peptide A |
| PENAPVFLICAVGFDSHH | SEQ ID NO: 707 | Amino acid sequence |
| | | of hRCAS1 5′ UTR |
| | | alternative reading |
| | | frame rf2 peptide B |
| GGCACGAGAGCTTACAGCCTGAGAA | SEQ ID NO: 708 | Nucleotide sequence |
| GAGCGTCTCGCCCGGGAGCGGCGGC | | of hSGA-1M |
| GGCCATCGAGACCCAACCCCAAGGC | | (Genbank Accession |
| GCGTCCCCCTCGGCCTCCCAGCGCT | | No. AY192728) 5′ |
| CCCAAGCCGCAGCGGCCGCGCCCCT | | UTR |
| TCAGCTAGCTCGCTCGCTCGCTCTG | | |
| CTTCCCTGCTGCCGGCTGCGCC | | |
| ARELTAEERLARERRRPSRPNPKA | SEQ ID NO: 709 | Amino acid sequence |
| RPPRPPSAPKPQRPRPFSLARSLC | | of hSGA-1M 5′ UTR |
| FPAAGCA | | alternative reading |
| | | frame rf0 peptides |
| EERLARERRRPSRPNPKARPPRPPS | SEQ ID NO: 710 | Amino acid sequence |
| APKPQRPRPFS | | of hSGA-1M 5′ UTR |
| | | alternative reading |
| | | frame rf0 peptide A |
| LARSLCFPAAGCA | SEQ ID NO: 711 | Amino acid sequence |
| | | of hSGA-1M 5′ UTR |
| | | alternative reading |
| | | frame rf0 peptide B |
| HESLQPEKSVSPGSGGGHRDPTPRR | SEQ ID NO: 712 | Amino acid sequence |
| VPLGLPALPSRSGRAPSASSLARSA | | of hSGA-1M 5′ UTR |
| SLLPAAP | | alternative reading |
| | | frame rf1 peptides |
| GTRAYSLRRASRPGAAAAIETQPQG | SEQ ID NO: 713 | Amino acid sequence |
| ASPSASQRSQAAAAAPLQLARSLAL | | of hSGA-1M 5′ UTR |
| LPCCRLRH | | alternative reading |
| | | frame rf2 peptides |
| GCAGCGCTGCGTCCTGCTGCGCACG | SEQ ID NO: 714 | Nucleotide sequence |
| TGGGAAGCCCTGGCCCCGGCCACCC | | of hTERT (Genbank |
| CCGCG | | Accession No. |
| | | NM_003219) 5′ UTR |
| QRCVLLRTWEALAPATPA | SEQ ID NO: 715 | Amino acid sequence |
| | | of hTERT 5′ UTR |
| | | alternative reading |
| | | frame rf0 peptides |
| SAASCCARGKPWPRPPPR | SEQ ID NO: 716 | Amino acid sequence |
| | | of hTERT 5′ UTR |
| | | alternative reading |
| | | frame rf1 peptides |
| AALRPAAHVGSPGPGHPRD | SEQ ID NO: 717 | Amino acid sequence |
| | | of hTERT 5′ UTR |
| | | alternative reading |
| | | frame rf2 peptides |
| AAGAAAATCCTGCTTGACAAAAACC | SEQ ID NO: 718 | Nucleotide sequence |
| GTCACTTAGGAAAAGATG | | of hTRP-P8 (Genbank |
| | | Accession No. |
| | | NM_024080) 5′ UTR |
| RKSCLTKTVTEKM | SEQ ID NO: 719 | Amino acid sequence |
| | | of hTRP-P8 5′ UTR |
| | | alternative reading |
| | | frame rf0 peptides |
| RKSCLTKTVT | SEQ ID NO: 720 | Amino acid sequence |
| | | of hTRP-P8 5′ UTR |
| | | alternative reading |
| | | frame rf0 peptide A |
| ENPAQKPSLRKR | SEQ ID NO: 721 | Amino acid sequence |
| | | of hTRP-P8 5′ UTR |
| | | alternative reading |
| | | frame rf1 peptides |
| KKILLDKNRHLGKD | SEQ ID NO: 722 | Amino acid sequence |
| | | of hTRP-P8 5′ UTR |
| | | alternative reading |
| | | frame rf2 peptides |
| GGGGTAAGGAGTTCAAGGCAGCGCC | SEQ ID NO: 723 | Nucleotide sequence |
| CACACCCGGGGGCTCTCCGCAACCC | | of hWTI (Genbank |
| GACCGCCTGTCCGCTCCCCCACTTC | | Accession No. |
| CCGCCCTCCCTCCCACCTACTCATT | | NM_000378) 5′ UTR |
| CACCCACCCACCCACCCAGAGCCGG | | |
| GACGGCAGCCCAGGCGCCCGGGCCC | | |
| CGCCGTCTCCTCGCCGCGATCCTGG | | |
| ACTTCCTCTTGCTGCAGGACCCGGC | | |
| TTCCACGTGTGTCCCGGAGCCGGCG | | |
| TCTCAGCACACGCTCCGCTCCGGGC | | |
| CTGGGTGCCTACAGCAGCCAGAGCA | | |
| GCAGGGAGTCCGGGACCCGGGCGGC | | |
| ATCTGGGCCAAGTTAGGCGCCGCCG | | |
| AGGCCAGCGCTGAACGTCTCCAGGG | | |
| CCGGAGGAGCCGCGGGGCGTCCGGG | | |
| TCTGAGCCTCAGCAA | | |
| GVRSSRQRPHPGALRNPTACPLPHF | SEQ ID NO: 724 | Amino acid sequence |
| PPSLPPTHSPTHPPRAGTAAQAPGP | | of hWTI 5′ UTR |
| RRLLAAILDFLLLQDPASTCVPEPA | | alternative reading |
| SQHTLRSGPGCLQQPEQQGVRDPGG | | frame rf0 peptides |
| IWAKLGAAEASAERLQGRRSRGASG | | |
| SEPQQ | | |
| XGGVQGSAHTRGLSATRPPVRSPT | SEQ ID NO: 725 | Amino acid sequence |
| SRPPSHLLIHPPTHPEPGRQPRRPG | | of hWTI 5′ UTR |
| PAVSSPRSWTSSCCRTRLPRVSRSR | | alternative reading |
| RLSTRSAPGLGAYSSQSSRESGTRA | | frame rf1 peptides |
| ASGPSAPPRPALNVSRAGGAAGRP | | |
| GLSLSK | | |
| GVQGSAHTRGLSATRPPVRSPTSRP | SEQ ID NO: 726 | Amino acid sequence |
| PSHLLIHTPPTHPEPGRQPRRPGPAV | | of hWTI 5′ UTR |
| SSPRSWTSSCCRTRLPRVSRSRRLS | | alternative reading |
| TRSAPGLGAYSSQSSRESGTRAASG | | frame rf1 peptide A |
| PS | | |
| APPRPALNVSRAGGAAGRPGLSLSK | SEQ ID NO: 727 | Amino acid sequence |
| | | of hWTI 5′ UTR |
| | | alternative reading |
| | | frame rf1 peptide B |
| GKEFKAAPTPGGSPQPDRLSAPPLP | SEQ ID NO: 728 | Amino acid sequence |
| ALPPTYSFTHPPTQSRDGSPGARAP | | of hWTI 5′ UTR |
| PSPRRDPGLPLAAGPGFHVCPGAGV | | alternative reading |
| SAHAPLRAWVPTAARAAGSPGPGRH | | frame rf2 peptides |
| LGQVRRRRGQRTSPGPEEPRGVRV | | |
| ASAN | | |
| GKEFKAAPTPGGSPQPDRLSAPPLP | SEQ ID NO: 729 | Amino acid sequence |
| ALPPTYSFTHPPTQSRDGSPGARAP | | of hWTI 5′ UTR |
| PSPRRDPGLPLAAGPGFHVCPGAGV | | alternative reading |
| SAHAPLRAWVPTAARAAGSPGPGRH | | frame rf2 peptide A |
| LGQVRRRRGQR | | |
| TSPGPEEPRGVRV | SEQ ID NO: 730 | Amino acid sequence |
| | | of hWTI 5′ UTR |
| | | alternative reading |
| | | frame rf2 peptide B |

### EXAMPLE 25

### Plasmid Constructs and Tumor Cell Lines for Expressing HER-2

[0574] This Example discloses the construction of plasmid vectors and tumor cell lines for the expression of human HER-2 and HER-2 fusion proteins.

[0575] Full-length human HER-2 was cloned from a SK-BR3 cell line according to methods known in the art (see, PCT Patent Application Publication No. WO 01/74855) and cloned into the MIRB and pCR3.1 expression vectors (Naski et al., Nat. Genet 13:233-237 (1996) and Invitrogen, (Carlsbad, Calif.), respectively). The MIRB vector has a multiple cloning site followed by an IRES neoR gene for selection of transfected cells with neomycin.

[0576] The hHER-2/E14 tumor cell line was generated by transfecting the mouse EL4 thymoma cell line (ATCC No. TIB-39, Rockville, Md.) with full-length human HER-2 cDNA cloned into the MIRB vector. The hHER-2/B16 tumor cell line was generated by transfecting the mouse B16 melanoma cell line (ATCC No. CRL-6322, Rockville, Md.) with full-length human HER-2 cDNA cloned into the pCR3.1 vector.

[0577] HER500•rGM-CSF is a recombinant fusion protein comprising an amino-terminal 32 amino acid signal sequence from human prostatic acid phosphatase (hPAP; Genbank Accession No. NM_{—}001099 amino acids 1-32); a 3 amino acid sequence of the mature hPAP protein (Genbank Accession No. NM_{—}001099 amino acids 33-35); an Ala-Arg linker; a 3 amino acid hHER-2 signal sequence (Genbank Accession No. M11730 amino acids 19-21); 289 amino acids of the mature hHER-2 membrane distal extracellular domain (Genbank Accession No. M11730 amino acids 22-310); an Ala linker; the OVA-derived immunodominant octapeptide SIINFEKL (OVA₂₅₋₂₆₄); 217 amino acids of the hHER-2 membrane distal intracellular domain (Genbank Accession No. M11730 amino acids 1038-1254); the coding sequence for mature rat GM-CSF (Genbank Accession No. U00620 amino acids 1-127); and a C-terminal affinity tag consisting of GAPPPPAHHHHHH. Construction of HER500•rGM-CSF is disclosed in PCT Patent Application Publication No. WO 01/74855, incorporated herein by reference in its entirety. The polynucleotide sequence of HER500-rGM-CSF is presented herein as SEQ ID NO: 13, which corresponds to Genbank Accession No. AX268288.

[0578] The cDNA encoding human GM-CSF (hGM-CSF) was amplified by PCR from first strand cDNA made from mRNA isolated from human peripheral blood mononuclear cells (PBMNC). The primer used in the PCR reaction delineate nucleotides 60 to 440 of GenBank Acc. No. NM_{—}000758 and introduce a exogenous BamHI site directly 5′ mature hGM and a XbaI site 3′ of the of the native stop codon. The resulting fragment was digested with the appropriate restriction enzymes and cloned into the vector pCR3.1 (Invitrogen, Carlsbad, Calif.), resulting in plasmid hGM-pCR3.1. A derivative of mature hGM-CSF was made by PCR using primers that introduce BamHI site 5′ to the coding region for mature hGM-CSF and four consecutive prolines immediately 3′ mature hGM-CSF. This amplified fragment of hGM-CSF was restricted with the appropriate enzymes and ligated to plasmid pCR3.1 derivative in frame with six consecutive histidines followed by a stop codon, resulting in plasmid hGMPH6-pCR3.2. The HER500 gene was ligated in frame with hGMPH6 gene, resulting plasmid HER500hGMPH6-pCR3.2. Plasmid HER500hGMPH6-pCR3.2 encodes, in the 5′ to 3′ direction: a 32 amino acid PAP signal sequence (amino acids 1 to 32 of GeneBank Acc NM_{—}001099), a 3 amino acid sequence of the mature PAP protein (amino acids 33 to 35 of GeneBank Acc NM_{—}001099), a Ala Arg linker, 3 amino acids of HER2 signal sequence (amino acids 19 to 21 of GeneBank Acc No. M11730), 289 amino acids of mature HER2 membrane distal extracellular domain (amino acids 22 to 310 of GeneBank Acc M11730), 217 amino acids of the membrane distal intracellular HER2 domain (amino acids 1038 to 1254 of GeneBank Acc M11730), a 127 amino acid mature human GM-CSF sequence (amino acids 18 to 144 GenBank Acc NM_{—}000758) and a C-terminal tag consisting of Gly Ala Pro Pro Pro Pro Ala Ala Ala His His His His His His.

[0579] HER300 is a recombinant fusion protein comprising the 32 amino acid hPAP signal sequence (Genbank Accession No. NM_{—}001099 amino acids 1-32); the 3 amino acid sequence of the mature hPAP protein (Genbank Accession No. NM_{—}001099 amino acids 33-35); an Ala-Arg linker; the 3 amino acid hHER-2 signal sequence (Genbank Accession No. M11730 amino acids 19-21); 289 amino acids of the mature hHER-2 membrane distal extracellular domain (Genbank Accession No. M11730 amino acids 22-310); an Ala linker; OVA₂₅₇264; and an AAAHHHHHH C-terminal affinity tag. The polynucleotide sequence of HER300 is presented herein as SEQ ID NO: 14.

[0580] Expression vectors comprising the coding sequence for various HER-2 fusion proteins were used for baculovirus mediated transfection of insect SF21 cells (Clontech, Palo Alto, Calif.). Fusion protein products were recovered from the tissue culture supernatants and affinity purified by passage over a metal affinity column (NTA resin, Qiagen, Valencia, Calif.).

[0581] HER-2 fusion proteins comprising rat GM-CSF were tested for GM-CSF bioactivity using the proliferative response of GM-NFS-60 cells, a GM-CSF dependent cell line. The presence of HER-2 was verified using HER-2-specific mAb in Western blot analysis according to standard methods. Protein concentrations were determined by BCA assay (Pierce, Rockford, Ill.).

### EXAMPLE 26

### Immunizations

[0582] This Example discloses the immunization of mice with HER-2 loaded, activated dendritic cells (DC).

[0583] Enriched activated dendritic cells (DCs) were prepared as described (Laus et al., Nature Biotechnology 18:1269-1272 (2000)). Briefly, enriched preparations of activated DC were prepared by incubating female C57BL/6 spleen cells in tissue culture flasks for 2 h at 37° C., removing non-adherent cells, and subsequently culturing the remaining adherent cells for two days in the presence of 1 μM ionomycin (Sigma, St. Louis, Mo.). DC obtained in this manner were pulsed by sixteen hour co-culture with each of the indicated HER-2 ARF polypeptide pools or HER-2 fusion proteins in 1 μM ionomycin, washed two times and injected intraperitoneally (i.p.) into the C57BL/6 mice (2.5×10⁵ cells per mouse). Two weeks after the last immunization, mice were challenged with a single i.p. injection of hHER-2/EL4 cells or hHER-2/B 16 cells in 0.1 ml PBS. Mice were monitored daily and their survival recorded.

### EXAMPLE 27

### DNA Sequencing

[0584] Genomic DNA was prepared from EL4 cells stably transfected with MIRB or pCR3.1 plasmids encoding HER-2/neu cDNA. DNA was isolated from cultured animal cells using the DNeasy kit according to the manufacturer's protocol (Qiagen Inc. Valencia, Calif.).

[0585] Fragments of genomic DNA encoding the junction of CMV promoter and HER-2/neu 5′ORF were synthesized by PCR using 200 ng of genomic DNA as template with the following primers: CMV forward primers A) 5′-TACGGTAAACTGCCCACTTGG (SEQ ID NO: 290), B) 5′-AAATGTCGTAACAACTCCGCCC (SEQ ID NO: 291); and HER-2/neu reverse primers C) 5′-CTTGCAGCCAGCAAACTCCTGGATATTGG (SEQ ID NO: 292) and D) 5′-GCACAGGGCTTGCTGCACTTCTCACACC (SEQ ID NO: 293). Amplified fragments were excised from agarose gels and purified using Qiagen gel purification kit. DNA sequence was determined by automated fluorescent sequencing using an ABI373 and sequences were analyzed with the Sequencher software and compared to the NCBI database.

### EXAMPLE 28

### Cell Lines Expressing mTERT: Western Blot and RT-PCR Analysis

[0586] 6×10⁶ EL4, B16, and HeLa cells were lysed in 0.1 ml of 4° C. 25 mM Tris, 5 mM EDTA, 600 mM NaCl, 10% glycerol, 0.01 mM DTT, 0.1% NP-40, 1:1000 protease inhibitor cocktail III pH 8.0 (Calbiochem-Novabiochem Corp., San Diego, Calif.). Supernatants from cell lysis were subjected to SDS-PAGE followed by Western blotting using an anti-TERT polyclonal antibody (Oncogene Research Products, San Diego, Calif.).

[0587] The following two oligonucleotides were utilized for RT-PCR analysis of mTert mRNA expression in EL4 and B16 cell lines: (1) Forward 5′-CCTCATTCCTACTCAGCAACCTCCAGCC (SEQ ID NO: 522) and (2) Reverse 5′-GTCCATCAGCCAGAACAGGAACGTAGCC (SEQ ID NO: 523). The following two reference oligonucleotides were included for murine HPRT: (1) Forward 5′-GTTGGATACAGGCCAGACTTTGTTG (SEQ ID NO: 524) and (2) Reverse 5′-GAGGGTAGGCTGGCCTATAGGCT (SEQ ID NO: 525). Reiner et al., J. Immulol. Meth. 165:37 (1993). Total RNA was extracted from 5×10⁶ cells using RNeasy kit (Qiagen) following manufacturers directions. 2.5 μg of total RNA was treated with DNAse I (ProMega) to remove any contaminating genomic DNA, and 1 μg of treated total RNA was converted to cDNA using Superscript II reverse transcriptase (Invitrogen), and then used for PCR with HPRT or mTert primers.

### EXAMPLE 29

### Prevention of In Vivo Tumor Growth by Pre-Immunization with HER-2 Alternative Reading Frame Antigen-Pulsed Dendritic Cells

[0588] This Example discloses the protective anti-tumor efficacy of dendritic cells loaded ex vivo with human HER-2 ARF polypeptide pools.

[0589] The effect of pre-immunization with HER-2-ARF polypeptide-pulsed activated DC on suppression of in vivo growth of HER-2-expressing autologous tumors was evaluated in a mouse animal model system. The results of two independent experiments using hHER-2/EL4 cells are shown in FIGS. 1A and 1B, respectively. The results of two independent experiments using hHER-2/B 16 tumor cells are shown in FIGS. 2A and 2B, respectively.

[0590] Immunization with HER-2 ARF Pool B or HER500rGM-CSF pulsed DC prevented tumor growth, whereas treatment with Pool A or HER300 had little effect. The protein antigens HER500rGM-CSF and HER300 act as positive and negative controls, respectively (FIG. 1A).

[0591] The melanoma B16 tumor model is more aggressive than the thymoma EL4 tumor line; few if any immunized mice survive tumor challenge with B16 cells. When mice were challenged with B16 cells expressing an irrelevant antigen (i.e. mouse PAP), there was no protection provided by HER-2 ARF polypeptide Pool B, HER500rGM-CSF, or HER-2 ARF polypeptide Pool A. This result indicates that the protection observed against challenge by B16 tumor line expressing hHER-2 provided by HER-2 ARF Pool B or HER500rGM-CSF (but not HER-2 ARF Pool A) was specific to expression of the HER-2 gene in the tumor cell line.

[0592] Mice immunized with Pool B were protected against tumor challenge with either hHER-2/EL4 or hHER-2/B16 tumor cells. In contrast, immunization with Pool A was ineffective in protecting the mice against tumor challenge. FIG. 3 demonstrates that when Pool B was further subdivided, Pool B3 protected against tumor challenge, and yet the structurally similar Pool B2 did not.

[0593] Thus, the results shown in FIGS. 1 and 2 indicate that Pool B was a significantly better immunogen than HER500rGM-CSF in the hHER-2/EL4 tumor model and in the hHER-2/B16 tumor model. When Pool B was further subdivided into the 6 overlapping polypeptides representing the rf1 ARF polypeptide initiating at nucleotide 2 (i.e. Pool B2) and the 25 overlapping polypeptides corresponding to the rf2 ARF polypeptide initiating at nucleotide 3 (i.e. Pool B3), only Pool B3 was protective against hHER-2/EL4 tumor challenge (FIG. 3).

### EXAMPLE 30

### Prevention of In Vivo Tumor Growth by Pre-Immunization with mTERT Alternative Reading Frame Antigen-Pulsed Dendritic Cells

[0594] This Example discloses the protective anti-tumor efficacy of dendritic cells loaded ex vivo with mouse TERT ARF polypeptide pools.

[0595] Western blot and RT-PCR analyses of nuclear extracts were employed to demonstrate that tumor cell lines B16 and EL4 both express endogenous mouse TERT from genomic sequence. The data in FIGS. 4A and 4B show that immunization with mTERT ARF pools 1, 2, and 3 were approximately equally protective in mice challenged with hHER-2/EL4 tumors. hHER-2 ARF Pool B acted as a positive control while Pool A served as a negative control. Dendritic cells loaded with mTERT Pools 1, 2 and 3 combined into a single pool elicited tumor protection equivalent to the individual pools of ARF peptides. The same general pattern of tumor protection was observed when mice were challenged with the hHER-2/B16 tumor cells (FIG. 5A). DC loaded with each of the three mTERT ARF pools were equally protective against tumor challenge.

[0596] In a second pair of experiments, the survival of mice pre-immunized with E.HER2 and HER2/pCR3.1 antigen followed by tumor challenge was assessed. Results of these experiments are presented herein in FIGS. 6A and 6B, respectively.

### EXAMPLE 31

### Prevention of In Vivo Tumor Growth by Immunization with PAP-Derived ARF Peptides

[0597] This Example discloses the in vivo efficacy of PAP-derived ARF peptides in reducing tumor growth.

[0598] As presented within Example 5, Table 8, there are nine PAP Arf sequences. The first two initiate at nucleotide positions 5 and 3, respectively (relative to rf0 initiating AUG), and the remaining seven initiate with the AUG 3′ to the rf0 AUG. The corresponding 23 overlapping peptides average 15 residues in length with a moving window of four residues. See, Example 5, Table 9; SEQ ID NOs. 257-279. These peptides average 15 residues in length. A moving window of four residues was used to overlap consecutive polypeptides. Each open reading frame is named by the position of the first and the last nucleotide.

[0599] These 23 peptides were combined into a single pool and were administered in vivo to mice. The mice that were immunized with PAP-derived Arf peptides exhibited prolonged survival after the subsequent challenge with PAP-expressing tumor E.PAP. FIG. 7. The comparable level of protection was induced when PAP-derived recombinant GM-CSF fusion protein (PAP-hGM-CSF) was used as an immunogen. Similar to the HER-2+tumor model described in Example 29, the observed in vivo effects were Ag-specific, because immunizations with PAP-derived Arf peptides did not protect the mice against the PAP-tumor E.HER2.

### EXAMPLE 32

### Immunological Mechanism of ARF Peptide-Induced Anti-Tumor Protection

[0600] To elucidate the contribution of distinct immune system compartments to the anti-tumor protection that was observed, mice were immunized with B3 pool of HER-2-derived Arf peptides, and then depleted of either CD4⁺ or CD8⁺ cells. In vivo elimination of either CD4⁺ or CD8⁺ T cells rendered these mice susceptible to subsequent challenge with E.HER2 (FIG. 8A) while the depletion of NK1.1⁺ cells had no such effect. These data demonstrated that both CD4⁺ and CD8⁺ T cells were important in achieving optimal tumor clearance.

[0601] To define the individual peptide(s) responsible for anti-tumor protection, HER-2-derived Arf pool B3 was subdivided into 5 groups, each pool containing 4-5 peptides. Only mice immunized with the sub-pool containing peptides 3e, 3f, 3g, and 3h exhibited the same degree of anti-tumor resistance as the animals immunized with the entire B3 pool. FIG. 8B. Further testing of individual peptides of interest revealed the strong protective capabilities of 3g and 3h. FIG. 8C. Since these two peptides share the same 11-mer sequence RHEAAAPCQSR, these data suggest that this epitope is efficacious in the protection of mice against challenge with a HER-2-expressing tumor.

[0602] To test the possibility that the demonstrated in vivo efficacy of the 11-mer sequence was due to the specific elimination of tumor by T lymphocytes recognizing the Arf epitope, Arf peptide-specific T cells were tested for response to the same tumor in vitro. CD8 T cell hybridoma B6-H9.B7, specific for the protective Arf peptide 3h, was isolated from mice immunized with HER-2-derived Arf pool B peptides. FIG. 8D. This hybridoma was stimulated by untransfected EL-4 tumor cells pre-pulsed with the peptide 3h as well as an E.HER2 tumor transfectant in the absence of any externally added Arf peptide. Since the HER-2 primary structure does not comprise a sequences homologous to the protective Arf 11-mer, above, it is likely that the corresponding Arf epitope was generated within E.HER2 cells.

[0603] Arf epitope-specific MHC class I-dependent CD8⁺ T cell hybridoma B6.H9-B7 was obtained by fusing thymoma cell line BWZ.36CD8 with splenocytes of mice immunized with HER-2-derived Arf pool B3 peptides. Sanderson et al., Int. Immunol. 6:369-376 (1994). The T cell hybridoma assay was performed as described previously. Karttunen et al., Proc. Natl. Acad. Sci. USA. 88:3972-3976 (1991). Briefly, 10⁵ hybridoma cells were incubated in 0.2 ml micro-wells with designated washed Ag-pulsed APC. Stimulation of B6.H9-B7 was visualized after incubation with chlorophenol red B-galactoside (expressed in relative light units). FIG. 8E.

[0604] Although the present invention has been described in some detail by way of illustration and example for purposes of clarity of understanding, changes and modifications can be carried out without departing from the scope of the invention, which is intended to be limited only by the scope of the appended claims.

1. An isolated alternative reading frame (ARF) polypeptide comprising at least 9 amino acids wherein said ARF polypeptide capable of eliciting an immune response and wherein said ARF polypeptide corresponds to a polypeptide generated by an in vivo translational error selected from the group consisting of:
(a) synthesis of polypeptides in reading frames rf0, rf1, and rf2, generated through AUG translation initiation of open reading frames in 5′ and 3′ untranslated regions (UTRs);
(b) frame-shifting of the initiation complex at the normal rf0 AUG codon one base (rf1) or two bases (rf2) forward or one base (rf2) or two bases (rf1) backward;
(c) formation of an initiation complex at an AUG codon that is downstream (i.e. 3′ to) the normal initiation AUG codon;
(d) formation of an initiation complex at an internal ribosome entry sites (IRES) located 3′ to the site of normal cap-dependent ribosomal entry;
(e) frame shifting of the ribosome through random and programmed frame-shifts from rf0 to rf1 or rf2 reading frames;
(f) formation of initiation complex at rf1 or rf2 codons other than AUG, such as, for example, ACG or CTG;
(g) ribosomal skipping of mRNA segments;
(h) ribosomal suppression of termination codons and subsequent translational readthrough;
(i) synthesis of polypeptides in reading frames rf1, rf2, and rf3 generated through AUG translation initiation of open reading frames (ORFs) in junk DNA;
(j) synthesis of polypeptides in reading frames 3, 4, and 5 (i.e. rf3, rf4, and rf5) resulting from the translation of antisense strands of genes that are expressed through transcription from cryptic promoters; and
(k) alternative mRNA splice variants wherein an intron encoded polypeptide reads into exon reading frames rf1 or rf2 of a normal gene product.

2. The isolated ARF polypeptide of claim 1 wherein said immune response is a cytotoxic T-cell (CTL) response.

3. The isolated ARF polypeptide of claim 1 wherein translation of said ARF polypeptide initiates at nucleotide 2 of the normal rf0 initiation codon.

4. The isolated ARF polypeptide of claim 1 wherein translation of said ARF polypeptide initiates at nucleotide 3 of the normal rf0 initiation codon.

5. The isolated ARF polypeptide of claim 1 wherein translation of said ARF polypeptide initiates at an AUG at an internal ribosome entry sites (IRES) located 3′ to the site of normal ribosomal entry.

6. An isolated alternative reading frame (ARF) polypeptide comprising at least 9 amino acids wherein said ARF polypeptide is derived from a polynucleotide selected from the group consisting of human tyrosine kinase receptor (hHER-2, SEQ ID NO: 2); human telomerase reverse transcriptase (hTERT, SEQ ID NO: 4); mouse telomerase reverse transcriptase (mTERT, SEQ ID NO: 6); human transient receptor potential cation channel 8 (hTrpP8, SEQ ID NO: 8); human prostatic acid phosphatase (hPAP, SEQ ID NO: 10); human prostatic acid phosphatase (hPAP, SEQ ID NO: 12), human carbonic anhydrase IX (hCA9, SEQ ID NO: 295), human carcinoembryonic antigen (hCEA, SEQ ID NO: 302), human prostate-specific membrane antigen (hPSMA; SEQ ID NO: 345), human prostate-specific antigen (hPSA, SEQ ID NO: 369); human p53 cellular tumor antigen (hp53; SEQ ID NO: 381); human P-glycoprotein (hPGY1; SEQ ID NO: 392); human alpha-fetoprotein (hAFP; SEQ ID NO: 424); human mucin precursor (hMUC1; SEQ ID NO: 441); human preferentially expressed antigen of melanoma (hPRAME; SEQ ID NO: 452); human ephrin receptor (hEPHA3; SEQ ID NO: 468); human peptidyl-prolyl isomerase and essential mitotic regulator (hPIN1; SEQ ID NO: 496); human BASE (hBASE; SEQ ID NO: 504); human prostate stem cell antigen (hPSCA; SEQ ID NO: 515); human SURVIVIN (hSURVIVIN; SEQ ID NO: 549); human WTI (hWTI; SEQ ID NO: 557); human SGA-M1 (hSGA-M1; SEQ ID NO: 566); human RCAS1 (hRCAS1; SEQ ID NO: 579); and human CYP1B1 (hCYP1B1; SEQ ID NO: 592) or a complement of any of the foregoing polynucleotides.

7. The isolated ARF polypeptide of claim 6 wherein said polypeptide comprises at least 20 amino acids.

8. The isolated ARF polypeptide of claim 6 wherein said polypeptide comprises at least 50 amino acids.

9. A fusion protein comprising two or more ARF polypeptides wherein each of said ARF polypeptides comprises at least 9 amino acids of an ARF polypeptide derived from a polynucleotide selected from the group consisting of human tyrosine kinase receptor (hHER-2, SEQ ID NO: 2); human telomerase reverse transcriptase (hTERT, SEQ ID NO: 4); mouse telomerase reverse transcriptase (mTERT, SEQ ID NO: 6); human transient receptor potential cation channel 8 (hTrpP8, SEQ ID NO: 8); human prostatic acid phosphatase (hPAP, SEQ ID NOs: 10); human prostatic acid phosphatase (hPAP, SEQ ID NOs: 12); human carbonic anhydrase IX (hCA9, SEQ ID NO: 295); human carcinoembryonic antigen (hCEA, SEQ ID NO: 302); human prostate-specific membrane antigen (hPSMA; SEQ ID NO: 345), human prostate-specific antigen (hPSA, SEQ ID NO: 369); human p53 cellular tumor antigen (hp53; SEQ ID NO: 381); human P-glycoprotein (hPGY1; SEQ ID NO: 392); human alpha-fetoprotein (hAFP; SEQ ID NO: 424); human mucin precursor (hMUC1; SEQ ID NO: 441); human preferentially expressed antigen of melanoma (hPRAME; SEQ ID NO: 452); human ephrin receptor (hEPHA3; SEQ ID NO: 468); human peptidyl-prolyl isomerase and essential mitotic regulator (hPIN1; SEQ ID NO: 496); human BASE (hBASE; SEQ ID NO: 504); human prostate stem cell antigen (hPSCA; SEQ ID NO: 515); human SURVIVIN (hSURVIVIN; SEQ ID NO: 549); human WTI (hWTI; SEQ ID NO: 557); human SGA-M1 (hSGA-M1; SEQ ID NO: 566); human RCAS1 (hRCAS1; SEQ ID NO: 579); and human CYP1B1 (hCYP1B1; SEQ ID NO: 592) or a complement of any of the foregoing polynucleotides.

10. A polypeptide conjugate, comprising an N-terminal moiety and a C-terminal moiety wherein said N-terminal moiety comprises one or more ARF polypeptide and said C-terminal moiety comprises a polypeptide moiety that facilitates binding of said ARF polypeptide to an antigen presenting cell (APC) wherein said ARF polypeptide comprises at least 9 amino acids of an ARF polypeptide derived from a polynucleotide selected from the group consisting of human tyrosine kinase receptor (hHER-2, SEQ ID NO: 2); human telomerase reverse transcriptase (hTERT, SEQ ID NO: 4); mouse telomerase reverse transcriptase (mTERT, SEQ ID NO: 6); human transient receptor potential cation channel 8 (hTrpP8, SEQ ID NO: 8); human prostatic acid phosphatase (hPAP, SEQ ID NOs: 10); human prostatic acid phosphatase (hPAP, SEQ ID NOs: 12); human carbonic anhydrase IX (hCA9, SEQ ID NO: 295); human carcinoembryonic antigen (hCEA, SEQ ID NO: 302); human prostate-specific membrane antigen (hPSMA; SEQ ID NO: 345), human prostate-specific antigen (hPSA, SEQ ID NO: 369); human p53 cellular tumor antigen (hp53; SEQ ID NO: 381); human P-glycoprotein (hPGY1; SEQ ID NO: 392); human alpha-fetoprotein (hAFP; SEQ ID NO: 424); human mucin precursor (hMUC1; SEQ ID NO: 441); human preferentially expressed antigen of melanoma (hPRAME; SEQ ID NO: 452); human ephrin receptor (hEPHA3; SEQ ID NO: 468); human peptidyl-prolyl isomerase and essential mitotic regulator (hPIN1; SEQ ID NO: 496); human BASE (hBASE; SEQ ID NO: 504); human prostate stem cell antigen (hPSCA; SEQ ID NO: 515); human SURVIVIN (hSURVIVIN; SEQ ID NO: 549); human WTI (hWTI; SEQ ID NO: 557); human SGA-M1 (hSGA-M1; SEQ ID NO: 566); human RCAS1 (hRCAS1; SEQ ID NO: 579); and human CYP1B1 (hCYP1 B1; SEQ ID NO: 592) or a complement of any of the foregoing polynucleotides.

11. A polypeptide conjugate, comprising a C-terminal moiety and an N-terminal moiety wherein said C-terminal moiety comprises one or more ARF polypeptide and said N-terminal moiety comprises a polypeptide moiety that facilitates binding of said ARF polypeptide to an antigen presenting cell (APC) wherein said ARF polypeptide comprises at least 9 amino acids of an ARF polypeptide derived from a polynucleotide selected from the group consisting of human tyrosine kinase receptor (hHER-2, SEQ ID NO: 2); human telomerase reverse transcriptase (hTERT, SEQ ID NO: 4); mouse telomerase reverse transcriptase (mTERT, SEQ ID NO: 6); human transient receptor potential cation channel 8 (hTrpP8, SEQ ID NO: 8); human prostatic acid phosphatase (hPAP, SEQ ID NOs: 10); human prostatic acid phosphatase (hPAP, SEQ ID NOs: 12); human carbonic anhydrase IX (hCA9, SEQ ID NO: 295); human carcinoembryonic antigen (hCEA, SEQ ID NO: 302); human prostate-specific membrane antigen (hPSMA; SEQ ID NO: 345), human prostate-specific antigen (hPSA, SEQ ID NO: 369); human p53 cellular tumor antigen (hp53; SEQ ID NO: 381); human P-glycoprotein (hPGY1; SEQ ID NO: 392); human alpha-fetoprotein (hAFP; SEQ ID NO: 424); human mucin precursor (hMUC1; SEQ ID NO: 441); human preferentially expressed antigen of melanoma (hPRAME; SEQ ID NO: 452); human ephrin receptor (hEPHA3; SEQ ID NO: 468); human peptidyl-prolyl isomerase and essential mitotic regulator (hPIN1; SEQ ID NO: 496); human BASE (hBASE; SEQ ID NO: 504); human prostate stem cell antigen (hPSCA; SEQ ID NO: 515); human SURVIVIN (hSURVIVIN; SEQ ID NO: 549); human WTI (hWTI; SEQ ID NO: 557); human SGA-M1 (hSGA-M1; SEQ ID NO: 566); human RCAS1 (hRCAS1; SEQ ID NO: 579); and human CYP1B1 (hCYP1B1; SEQ ID NO: 592) or a complement of any of the foregoing polynucleotides.

12. The polypeptide conjugate of claim 10 or claim 11 wherein said APC binding protein is selected from the group consisting of GM-CSF, IL-1, TNF, IL-4, CD40L, CTLA4, CD28, FLT-3 ligand, and a functional fragment, derivative or variant thereof.

13. An immunogenic compositions, comprising an antigen presenting cell (APC) pulsed ex vivo with an isolated ARF polypeptide.

14. The immunogenic composition of claim 13 wherein said isolated ARF polypeptide is derived from a polynucleotide selected from the group consisting of human tyrosine kinase receptor (hHER-2, SEQ ID NO: 2); human telomerase reverse transcriptase (hTERT, SEQ ID NO: 4); mouse telomerase reverse transcriptase (mTERT, SEQ ID NO: 6); human transient receptor potential cation channel 8 (hTrpP8, SEQ ID NO: 8); human prostatic acid phosphatase (hPAP, SEQ ID NOs: 10); human prostatic acid phosphatase (hPAP, SEQ ID NOs: 12); human carbonic anhydrase IX (hCA9, SEQ ID NO: 295); human carcinoembryonic antigen (hCEA, SEQ ID NO: 302); human prostate-specific membrane antigen (hPSMA; SEQ ID NO: 345), human prostate-specific antigen (hPSA, SEQ ID NO: 369); human p53 cellular tumor antigen (hp53; SEQ ID N O: 381); human P-glycoprotein (hPGY1; SEQ ID NO: 392); human alpha-fetoprotein (hAFP; SEQ ID NO: 424); human mucin precursor (hMUC1; SEQ ID NO: 441); human preferentially expressed antigen of melanoma (hPRAME; SEQ ID NO: 452); human ephrin receptor (hEPHA3; SEQ ID NO: 468); human peptidyl-prolyl isomerase and essential mitotic regulator (hPIN1; SEQ ID NO: 496); human BASE (hBASE; SEQ ID NO: 504); and human prostate stem cell antigen (hPSCA; SEQ ID NO: 515); human SURVIVIN (hSURVIVIN; SEQ ID NO: 549); human WTI (hWTI; SEQ ID NO: 557); human SGA-M1 (hSGA-M1; SEQ ID NO: 566); human RCAS1 (hRCAS1; SEQ ID NO: 579); and human CYP1B1 (hCYP1B1; SEQ ID NO: 592) or a complement of any of the foregoing polynucleotides.

15. An immunogenic composition, comprising an antigen presenting cell (APC) pulsed ex vivo with a fusion protein comprising two or more isolated ARF polypeptides.

16. The immunogenic composition of claim 22 wherein each of said two or more isolated ARF polypeptides comprise at least 9 amino acids of an ARF polypeptide derived from a polynucleotide selected from the group consisting of human tyrosine kinase receptor (hHER-2, SEQ ID NO: 2); human telomerase reverse transcriptase (hTERT, SEQ ID NO: 4); mouse telomerase reverse transcriptase (mTERT, SEQ ID NO: 6); human transient receptor potential cation channel 8 (hTrpP8, SEQ ID NO: 8); human prostatic acid phosphatase (hPAP, SEQ ID NOs: 10); human prostatic acid phosphatase (hPAP, SEQ ID NOs: 12); human carbonic anhydrase IX (hCA9, SEQ ID NO: 295); human carcinoembryonic antigen (hCEA, SEQ ID NO: 302); human prostate-specific membrane antigen (hPSMA; SEQ ID NO: 345), human prostate-specific antigen (hPSA, SEQ ID NO: 369); human p53 cellular tumor antigen (hp53; SEQ ID NO: 381); human P-glycoprotein (hPGY1; SEQ ID NO: 392); human alpha-fetoprotein (hAFP; SEQ ID NO: 424); human mucin precursor (hMUC1; SEQ ID NO: 441); human preferentially expressed antigen of melanoma (hPRAME; SEQ ID NO: 452); human ephrin receptor (hEPHA3; SEQ ID NO: 468); human peptidyl-prolyl isomerase and essential mitotic regulator (hPIN1; SEQ ID NO: 496); human BASE (hBASE; SEQ ID NO: 504); and human prostate stem cell antigen (hPSCA; SEQ ID NO: 515); human SURVIVIN (hSURVIVIN; SEQ ID NO: 549); human WTI (hWTI; SEQ ID NO: 557); human SGA-M1 (hSGA-M1; SEQ ID NO: 566); human RCAS1 (hRCAS1; SEQ ID NO: 579); and human CYP1B1 (hCYP1B1; SEQ ID NO: 592) or a complement of any of the foregoing polynucleotides.

17. An immunogenic composition, comprising an antigen presenting cell (APC) pulsed ex vivo with a protein conjugate comprising an N-terminal moiety and a C-terminal moiety wherein said N-terminal moiety comprises one or more ARF polypeptide and said C-terminal moiety comprises a polypeptide moiety that facilitates binding of said ARF polypeptide to an antigen presenting cell (APC) wherein said ARF polypeptide comprises at least 9 amino acids of an ARF polypeptide derived from a polynucleotide selected from the group consisting of human tyrosine kinase receptor (hHER-2, SEQ ID NO: 2); human telomerase reverse transcriptase (hTERT, SEQ ID NO: 4); mouse telomerase reverse transcriptase (mTERT, SEQ ID NO: 6); human transient receptor potential cation channel 8 (hTrpP8, SEQ ID NO: 8); human prostatic acid phosphatase (hPAP, SEQ ID NOs: 10); human prostatic acid phosphatase (hPAP, SEQ ID NOs: 12); human carbonic anhydrase IX (hCA9, SEQ ID NO: 295); human carcinoembryonic antigen (hCEA, SEQ ID NO: 302); human prostate-specific membrane antigen (hPSMA; SEQ ID NO: 345), human prostate-specific antigen (hPSA, SEQ ID NO: 369); human p53 cellular tumor antigen (hp53; SEQ ID NO: 381); human P-glycoprotein (hPGY1; SEQ ID NO: 392); human alpha-fetoprotein (hAFP; SEQ ID NO: 424); human mucin precursor (hMUC1; SEQ ID NO: 441); human preferentially expressed antigen of melanoma (hPRAME; SEQ ID NO: 452); human ephrin receptor (hEPHA3; SEQ ID NO: 468); human peptidyl-prolyl isomerase and essential mitotic regulator (hPIN1; SEQ ID NO: 496); human BASE (hBASE; SEQ ID NO: 504); human prostate stem cell antigen (hPSCA; SEQ ID NO: 515); human SURVIVIN (hSURVIVIN; SEQ ID NO: 549); human WTI (hWTI; SEQ ID NO: 557); human SGA-M1 (hSGA-M1; SEQ ID NO: 566); human RCAS1 (hRCAS1; SEQ ID NO: 579); and human CYP1B1 (hCYP1B1; SEQ ID NO: 592) or a complement of any of the foregoing polynucleotides.

18. An immunogenic composition, comprising an antigen presenting cell (APC) pulsed ex vivo with a protein conjugate comprising a C-terminal moiety and an N-terminal moiety wherein said C-terminal moiety comprises one or more ARF polypeptide and said N-terminal moiety comprises a polypeptide moiety that facilitates binding of said ARF polypeptide to an antigen presenting cell (APC) wherein said ARF polypeptide comprises at least 9 amino acids of an ARF polypeptide derived from a polynucleotide selected from the group consisting of human tyrosine kinase receptor (hHER-2, SEQ ID NO: 2); human telomerase reverse transcriptase (hTERT, SEQ ID NO: 4); mouse telomerase reverse transcriptase (mTERT, SEQ ID NO: 6); human transient receptor potential cation channel 8 (hTrpP8, SEQ ID NO: 8); human prostatic acid phosphatase (hPAP, SEQ ID NOs: 10); human prostatic acid phosphatase (hPAP, SEQ ID NOs: 12); human carbonic anhydrase IX (hCA9, SEQ ID NO: 295); human carcinoembryonic antigen (hCEA, SEQ ID NO: 302); human prostate-specific membrane antigen (hPSMA; SEQ ID NO: 345), human prostate-specific antigen (hPSA, SEQ ID NO: 369); human p53 cellular tumor antigen (hp53; SEQ ID NO: 381); human P-glycoprotein (hPGY1; SEQ ID NO: 392); human alpha-fetoprotein (hAFP; SEQ ID NO: 424); human mucin precursor (hMUC1; SEQ ID NO: 441); human preferentially expressed antigen of melanoma (hPRAME; SEQ ID NO: 452); human ephrin receptor (hEPHA3; SEQ ID NO: 468); human peptidyl-prolyl isomerase and essential mitotic regulator (hPIN1; SEQ ID NO: 496); human BASE (hBASE; SEQ ID NO: 504); and human prostate stem cell antigen (hPSCA; SEQ ID NO: 515); human SURVIVIN (hSURVIVIN; SEQ ID NO: 549); human WTI (hWTI; SEQ ID NO: 557); human SGA-M1 (hSGA-M1; SEQ ID NO: 566); human RCAS1 (hRCAS1; SEQ ID NO: 579); and human CYP1B1 (hCYP1B1; SEQ ID NO: 592) or a complement of any of the foregoing polynucleotides.

19. A method for identifying alternative reading frame (ARF) polypeptides capable of stimulating an immune response, said method comprising the steps of:
(a) selecting an antigen of interest wherein the antigen is encoded by a polynucleotide;
(b) identifying, based upon the nucleotide sequence of said polynucleotide, an rf1 or rf2 alternative reading frame encoding an alternative reading frame polypeptide;
(c) synthesizing or expressing a polypeptide encoded by the rf1 or rf2 alternative reading frames;
(d) priming a sample comprising an antigen presenting cells (APC) with the synthesized polypeptide;
(e) contacting the primed APC with a sample comprising a population of naïve cytotoxic T-cells (CTLs) to produce a population of activated CTLs; and
(f) contacting the population of CTLs with a cell expressing the antigen of interest, wherein lysis of the antigen expressing cell by the activated CTLs indicates that the ARF polypeptide is capable of stimulating an immune response.

20. An alternative reading frame (ARF) polypeptide capable of stimulating an immune response wherein said ARF polypeptide is identified by the method of claim 19.

21. The method of claim 19 wherein said APC is a dendritic cell (DC).

22. A method for eliciting an immune response in a patient, said method comprising the steps of:
(a) obtaining from said patient a sample containing antigen presenting cells (APCs);
(b) isolating from said sample said APCs;
(c) priming said isolated APCs ex vivo with an ARF polypeptide, conjugate and/or fusion protein wherein the primed APCs are capable of stimulating an immune response in vivo; and
(d) administering said primed APCs to the patient.

23. The method of claim 22 wherein said immune response is a cytotoxic T-cell response.

24. The method of claim 23 wherein said cytotoxic T-cell response is directed specifically against a tumor cell expressing an antigen.

25. The method of claim 22 wherein said APCs are dendritic cells (DCs).

26. A method for inhibiting proliferation of a tumor cell in a cancer patient, said method comprising the steps of:
(a) obtaining from said cancer patient a sample containing antigen presenting cells (APCs);
(b) isolating from said sample said antigen presenting cells;
(c) priming said isolated antigen presenting cells (APCs) ex vivo with an ARF polypeptide, conjugate and/or fusion protein wherein the primed APCs are capable of stimulating an immune response in vivo; and
(d) administering said primed APCs to said cancer patient.

27. The method of claim 27 wherein said immune response is a cytotoxic T-cell response.

28. The method of claim 27 wherein said cytotoxic T-cell response is directed specifically against a tumor cell expressing an antigen.

29. The method of claim 26 wherein said APCs are dendritic cells (DCs).

30. The method of claim 26 wherein said tumor cell is from a cancer is selected from the group consisting of a soft tissue sarcoma, a lymphoma, a cancer of the brain, a cancer of the esophagus, a cancer of the uterus, cervix, a cancer of the bone, a cancer of the lung, a cancer of the endometrium, a cancer of the bladder, a cancer of the breast, a cancer of the larynx, a cancer of the colon/rectum, a cancer of the stomach, a cancer of the ovary, a cancer of the pancreas, a cancer of the adrenal gland, and a cancer of the prostate.

31. A method for eliciting an immune response in a patient, said method comprising the steps of:
(a) obtaining from said patient a sample containing antigen presenting cells (APCs);
(b) isolating from said sample said APCs;
(c) priming said isolated APCs ex vivo with a vector comprising a polynucleotide encoding an ARF polypeptide and/or fusion protein wherein said primed APCs are capable of stimulating an immune response in vivo; and
(d) administering said primed APCs to the patient.

32. The method of claim 31 wherein said vector is selected from the group consisting of an adenoviral vector, a retroviral vector, and an adeno-associated viral vector.

33. A method for eliciting an immune response in a patient, said method comprising the step of administering to said patient an ARF polypeptide, conjugate, and/or fusion protein wherein said ARF polypeptide, conjugate, and/or fusion protein is capable of stimulating an immune response in vivo.

34. A method for eliciting an immune response in a patient, said method comprising the step of administering to said patient a vector comprising a polynucleotide encoding an ARF polypeptide and/or fusion protein wherein said ARF polypeptide and/or fusion protein is capable of stimulating an immune response in vivo.

The application's sequence listing, which the Patent Office published only in electronic form, follows.

SEQUENCE LISTING (733 sequences)

SEQ ID NO: 1 - protein, 1255 aa, Human
MELAALCRWGLLLALLPPGAASTQVCTGTDMKLRLPASPETHLDMLRHLYQGCQVVQGNLELTYLPTNASLSFLQDIQEVQGYVLIAHNQVRQVPLQRLRIVRGTQLFEDNYALAVLDNGDPLNNTTPVTGASPGGLRELQLRSLTEILKGGVLIQRNPQLCYQDTILWKDIFHKNNQLALTLIDTNRSRACHPCSPMCKGSRCWGESSEDCQSLTRTVCAGGCARCKGPLPTDCCHEQCAAGCTGPKHSDCLACLHFNHSGICELHCPALVTYNTDTFESMPNPEGRYTFGASCVTACPYNYLSTDVGSCTLVCPLHNQEVTAEDGTQRCEKCSKPCARVCYGLGMEHLREVRAVTSANIQEFAGCKKIFGSLAFLPESFDGDPASNTAPLQPEQLQVFETLEEITGYLYISAWPDSLPDLSVFQNLQVIRGRILHNGAYSLTLQGLGISWLGLRSLRELGSGLALIHHNTHLCFVHTVPWDQLFRNPHQALLHTANRPEDECVGEGLACHQLCARGHCWGPGPTQCVNCSQFLRGQECVEECRVLQGLPREYVNARHCLPCHPECQPQNGSVTCFGPEADQCVACAHYKDPPFCVARCPSGVKPDLSYMPIWKFPDEEGACQPCPINCTHSCVDLDDKGCPAEQRASPLTSIVSAVVGILLVVVLGVVFGILIKRRQQKIRKYTMRRLLQETELVEPLTPSGAMPNQAQMRILKETELRKVKVLGSGAFGTVYKGIWIPDGENVKIPVAIKVLRENTSPKANKEILDEAYVMAGVGSPYVSRLLGICLTSTVQLVTQLMPYGCLLDHVRENRGRLGSQDLLNWCMQIAKGMSYLEDVRLVHRDLAARNVLVKSPNHVKITDFGLARLLDIDETEYHADGGKVPIKWMALESILRRRFTHQSDVWSYGVTVWELMTFGAKPYDGIPAREIPDLLEKGERLPQPPICTIDVYMIMVKCWMIDSECRPRFRELVSEFSRMARDPQRFVVIQNEDLGPASPLDSTFYRSLLEDDDMGDLVDAEEYLVPQQGFFCPDPAPGAGGMVHHRHRSSSTRSGGGDLTLGLEPSEEEAPRSPLAPSEGAGSDVFDGDLGMGAAKGLQSLPTHDPSPLQRYSEDPTVPLPSETDGYVAPLTCSPQPEYVNQPDVRPQPPSPREGPLPAARPAGATLERAKTLSPGKNGVVKDVFAFGGAVENPEYLTPQGGAAPQPHPPPAFSPAFDNLYYWDQDPPERGAPPSTFKGTPTAENPEYLGLDVPV

SEQ ID NO: 2 - DNA, 4530 bp, Human
aattctcgagctcgtcgaccggtcgacgagctcgagggtcgacgagctcgagggcgcgcgcccggcccccacccctcgcagcaccccgcgccccgcgccctcccagccgggtccagccggagccatggggccggagccgcagtgagcaccatggagctggcggccttgtgccgctgggggctcctcctcgccctcttgccccccggagccgcgagcacccaagtgtgcaccggcacagacatgaagctgcggctccctgccagtcccgagacccacctggacatgctccgccacctctaccagggctgccaggtggtgcagggaaacctggaactcacctacctgcccaccaatgccagcctgtccttcctgcaggatatccaggaggtgcagggctacgtgctcatcgctcacaaccaagtgaggcaggtcccactgcagaggctgcggattgtgcgaggcacccagctctttgaggacaactatgccctggccgtgctagacaatggagacccgctgaacaataccacccctgtcacaggggcctccccaggaggcctgcgggagctgcagcttcgaagcctcacagagatcttgaaaggaggggtcttgatccagcggaacccccagctctgctaccaggacacgattttgtggaaggacatcttccacaagaacaaccagctggctctcacactgatagacaccaaccgctctcgggcctgccacccctgttctccgatgtgtaagggctcccgctgctggggagagagttctgaggattgtcagagcctgacgcgcactgtctgtgccggtggctgtgcccgctgcaaggggccactgcccactgactgctgccatgagcagtgtgctgccggctgcacgggccccaagcactctgactgcctggcctgcctccacttcaaccacagtggcatctgtgagctgcactgcccagccctggtcacctacaacacagacacgtttgagtccatgcccaatcccgagggccggtatacattcggcgccagctgtgtgactgcctgtccctacaactacctttctacggacgtgggatcctgcaccctcgtctgccccctgcacaaccaagaggtgacagcagaggatggaacacagcggtgtgagaagtgcagcaagccctgtgcccgagtgtgctatggtctgggcatggagcacttgcgagaggtgagggcagttaccagtgccaatatccaggagtttgctggctgcaagaagatctttgggagcctggcatttctgccggagagctttgatggggacccagcctccaacactgccccgctccagccagagcagctccaagtgtttgagactctggaagagatcacaggttacctatacatctcagcatggccggacagcctgcctgacctcagcgtcttccagaacctgcaagtaatccggggacgaattctgcacaatggcgcctactcgctgaccctgcaagggctgggcatcagctggctggggctgcgctcactgagggaactgggcagtggactggccctcatccaccataacacccacctctgcttcgtgcacacggtgccctgggaccagctctttcggaacccgcaccaagctctgctccacactgccaaccggccagaggacgagtgtgtgggcgagggcctggcctgccaccagctgtgcgcccgagggcactgctggggtccagggcccacccagtgtgtcaactgcagccagttccttcggggccaggagtgcgtggaggaatgccgagtactgcaggggctccccagggagtatgtgaatgccaggcactgtttgccgtgccaccctgagtgtcagccccagaatggctcagtgacctgttttggaccggaggctgaccagtgtgtggcctgtgcccactataaggaccctcccttctgcgtggcccgctgccccagcggtgtgaaacctgacctctcctacatgcccatctggaagtttccagatgaggagggcgcatgccagccttgccccatcaactgcacccactcctgtgtggacctggatgacaagggctgccccgccgagcagagagccagccctctgacgtccatcgtctctgcggtggttggcattctgctggtcgtggtcttgggggtggtctttgggatcctcatcaagcgacggcagcagaagatccggaagtacacgatgcggagactgctgcaggaaacggagctggtggagccgctgacacctagcggagcgatgcccaaccaggcgcagatgcggatcctgaaagagacggagctgaggaaggtgaaggtgcttggatctggcgcttttggcacagtctacaagggcatctggatccctgatggggagaatgtgaaaattccagtggccatcaaagtgttgagggaaaacacatcccccaaagccaacaaagaaatcttagacgaagcatacgtgatggctggtgtgggctccccatatgtctcccgccttctgggcatctgcctgacatccacggtgcagctggtgacacagcttatgccctatggctgcctcttagaccatgtccgggaaaaccgcggacgcctgggctcccaggacctgctgaactggtgtatgcagattgccaaggggatgagctacctggaggatgtgcggctcgtacacagggacttggccgctcggaacgtgctggtcaagagtcccaaccatgtcaaaattacagacttcgggctggctcggctgctggacattgacgagacagagtaccatgcagatgggggcaaggtgcccatcaagtggatggcgctggagtccattctccgccggcggttcacccaccagagtgatgtgtggagttatggtgtgactgtgtgggagctgatgacttttggggccaaaccttacgatgggatcccagcccgggagatccctgacctgctggaaaagggggagcggctgccccagccccccatctgcaccattgatgtctacatgatcatggtcaaatgttggatgattgactctgaatgtcggccaagattccgggagttggtgtctgaattctcccgcatggccagggacccccagcgctttgtggtcatccagaatgaggacttgggcccagccagtcccttggacagcaccttctaccgctcactgctggaggacgatgacatgggggacctggtggatgctgaggagtatctggtaccccagcagggcttcttctgtccagaccctgccccgggcgctgggggcatggtccaccacaggcaccgcagctcatctaccaggagtggcggtggggacctgacactagggctggagccctctgaagaggaggcccccaggtctccactggcaccctccgaaggggctggctccgatgtatttgatggtgacctgggaatgggggcagccaaggggctgcaaagcctccccacacatgaccccagccctctacagcggtacagtgaggaccccacagtacccctgccctctgagactgatggctacgttgcccccctgacctgcagcccccagcctgaatatgtgaaccagccagatgttcggccccagcccccttcgccccgagagggccctctgcctgctgcccgacctgctggtgccactctggaaagggccaagactctctccccagggaagaatggggtcgtcaaagacgtttttgcctttgggggtgccgtggagaaccccgagtacttgacaccccagggaggagctgcccctcagccccaccctcctcctgccttcagcccagccttcgacaacctctattactgggaccaggacccaccagagcggggggctccacccagcaccttcaaagggacacctacggcagagaacccagagtacctgggtctggacgtgccagtgtgaaccagaaggccaagtccgcagaagccctgatgtgtcctcagggagcagggaaggcctgacttctgctggcatcaagaggtgggagggccctccgaccacttccaggggaacctgccatgccaggaacctgtcctaaggaaccttccttcctgcttgagttcccagatggctggaaggggtccagcctcgttggaagaggaacagcactggggagtctttgtggattctgaggccctgcccaatgagactctagggtccagtggatgccacagcccagcttggccctttccttccagatcctgggtactgaaagccttagggaagctggcctgagaggggaagcggccctaagggagtgtctaagaacaaaagcgacccattcagagactgtccctgaaacctagtactgccccccatgaggaaggaacagcaatggtgtcagtatccaggctttgtacagagtgcttttctgtttagtttttactttttttgttttgtttttttaaagacgaaataaagacccaggggagaatgggtgttgtatggggaggcaagtgtggggggtccttctccacacccactttgtccatttgcaaatatattttggaaaac

SEQ ID NO: 3 - protein, 1132 aa, Human
MPRAPRCRAVRSLLRSHYREVLPLATFVRRLGPQGWRLVQRGDPAAFRALVAQCLVCVPWDARPPPAAPSFRQVSCLKELVARVLQRLCERGAKNVLAFGFALLDGARGGPPEAFTTSVRSYLPNTVTDALRGSGAWGLLLRRVGDDVLVHLLARCALFVLVAPSCAYQVCGPPLYQLGAATQARPPPHASGPRRRLGCERAWNHSVREAGVPLGLPAPGARRRGGSASRSLPLPKRPRRGAAPEPERTPVGQGSWAHPGRTRGPSDRGFCVVSPARPAEEATSLEGALSGTRHSHPSVGRQHHAGPPSTSRPPRPWDTPCPPVYAETKHFLYSSGDKEQLRPSFLLSSLRPSLTGARRLVETIFLGSRPWMPGTPRRLPRLPQRYWQMRPLFLELLGNHAQCPYGVLLKTHCPLRAAVTPAAGVCAREKPQGSVAAPEEEDTDPRRLVQLLRQHSSPWQVYGFVRACLRRLVPPGLWGSRHNERRFLRNTKKFISLGKHAKLSLQELTWKMSVRDCAWLRRSPGVGCVPAAEHRLREEILAKFLHWLMSVYVVELLRSFFYVTETTFQKNRLFFYRKSVWSKLQSIGIRQHLKRVQLRELSEAEVRQHREARPALLTSRLRFIPKPDGLRPIVNMDYVVGARTFRREKRAERLTSRVKALFSVLNYERARRPGLLGASVLGLDDIHRAWRTFVLRVRAQDPPPELYFVKVDVTGAYDTIPQDRLTEVIASIIKPQNTYCVRRYAVVQKAAHGHVRKAFKSHVSTLTDLQPYMRQFVAHLQETSPLRDAVVIEQSSSLNEASSGLFDVFLRFMCHHAVRIRGKSYVQCQGIPQGSILSTLLCSLCYGDMENKLFAGIRRDGLLLRLVDDFLLVTPHLTHAKTFLRTLVRGVPEYGCVVNLRKTVVNFPVEDEALGGTAFVQMPAHGLFPWCGLLLDTRTLEVQSDYSSYARTSIRASLTFNRGFKAGRNMRRKLFGVLRLKCHSLFLDLQVNSLQTVCTNIYKILLLQAYRFHACVLQLPFHQQVWKNPTFFLRVISDTASLCYSILKAKNAGMSLGAKGAAGPLPSEAVQWLCHQAFLLKLTRHRVTYVPLLGSLRTAQTQLSRKLPGTTLTALEAAANPALPSDFKTILD

SEQ ID NO: 4 - DNA, 4015 bp, Human
gcagcgctgcgtcctgctgcgcacgtgggaagccctggccccggccacccccgcgatgccgcgcgctccccgctgccgagccgtgcgctccctgctgcgcagccactaccgcgaggtgctgccgctggccacgttcgtgcggcgcctggggccccagggctggcggctggtgcagcgcggggacccggcggctttccgcgcgctggtggcccagtgcctggtgtgcgtgccctgggacgcacggccgccccccgccgccccctccttccgccaggtgtcctgcctgaaggagctggtggcccgagtgctgcagaggctgtgcgagcgcggcgcgaagaacgtgctggccttcggcttcgcgctgctggacggggcccgcgggggcccccccgaggccttcaccaccagcgtgcgcagctacctgcccaacacggtgaccgacgcactgcgggggagcggggcgtgggggctgctgctgcgccgcgtgggcgacgacgtgctggttcacctgctggcacgctgcgcgctctttgtgctggtggctcccagctgcgcctaccaggtgtgcgggccgccgctgtaccagctcggcgctgccactcaggcccggcccccgccacacgctagtggaccccgaaggcgtctgggatgcgaacgggcctggaaccatagcgtcagggaggccggggtccccctgggcctgccagccccgggtgcgaggaggcgcgggggcagtgccagccgaagtctgccgttgcccaagaggcccaggcgtggcgctgcccctgagccggagcggacgcccgttgggcaggggtcctgggcccacccgggcaggacgcgtggaccgagtgaccgtggtttctgtgtggtgtcacctgccagacccgccgaagaagccacctctttggagggtgcgctctctggcacgcgccactcccacccatccgtgggccgccagcaccacgcgggccccccatccacatcgcggccaccacgtccctgggacacgccttgtcccccggtgtacgccgagaccaagcacttcctctactcctcaggcgacaaggagcagctgcggccctccttcctactcagctctctgaggcccagcctgactggcgctcggaggctcgtggagaccatctttctgggttccaggccctggatgccagggactccccgcaggttgccccgcctgccccagcgctactggcaaatgcggcccctgtttctggagctgcttgggaaccacgcgcagtgcccctacggggtgctcctcaagacgcactgcccgctgcgagctgcggtcaccccagcagccggtgtctgtgcccgggagaagccccagggctctgtggcggcccccgaggaggaggacacagacccccgtcgcctggtgcagctgctccgccagcacagcagcccctggcaggtgtacggcttcgtgcgggcctgcctgcgccggctggtgcccccaggcctctggggctccaggcacaacgaacgccgcttcctcaggaacaccaagaagttcatctccctggggaagcatgccaagctctcgctgcaggagctgacgtggaagatgagcgtgcgggactgcgcttggctgcgcaggagcccaggggttggctgtgttccggccgcagagcaccgtctgcgtgaggagatcctggccaagttcctgcactggctgatgagtgtgtacgtcgtcgagctgctcaggtctttcttttatgtcacggagaccacgtttcaaaagaacaggctctttttctaccggaagagtgtctggagcaagttgcaaagcattggaatcagacagcacttgaagagggtgcagctgcgggagctgtcggaagcagaggtcaggcagcatcgggaagccaggcccgccctgctgacgtccagactccgcttcatccccaagcctgacgggctgcggccgattgtgaacatggactacgtcgtgggagccagaacgttccgcagagaaaagagggccgagcgtctcacctcgagggtgaaggcactgttcagcgtgctcaactacgagcgggcgcggcgccccggcctcctgggcgcctctgtgctgggcctggacgatatccacagggcctggcgcaccttcgtgctgcgtgtgcgggcccaggacccgccgcctgagctgtactttgtcaaggtggatgtgacgggcgcgtacgacaccatcccccaggacaggctcacggaggtcatcgccagcatcatcaaaccccagaacacgtactgcgtgcgtcggtatgccgtggtccagaaggccgcccatgggcacgtccgcaaggccttcaagagccacgtctctaccttgacagacctccagccgtacatgcgacagttcgtggctcacctgcaggagaccagcccgctgagggatgccgtcgtcatcgagcagagctcctccctgaatgaggccagcagtggcctcttcgacgtcttcctacgcttcatgtgccaccacgccgtgcgcatcaggggcaagtcctacgtccagtgccaggggatcccgcagggctccatcctctccacgctgctctgcagcctgtgctacggcgacatggagaacaagctgtttgcggggattcggcgggacgggctgctcctgcgtttggtggatgatttcttgttggtgacacctcacctcacccacgcgaaaaccttcctcaggaccctggtccgaggtgtccctgagtatggctgcgtggtgaacttgcggaagacagtggtgaacttccctgtagaagacgaggccctgggtggcacggcttttgttcagatgccggcccacggcctattcccctggtgcggcctgctgctggatacccggaccctggaggtgcagagcgactactccagctatgcccggacctccatcagagccagtctcaccttcaaccgcggcttcaaggctgggaggaacatgcgtcgcaaactctttggggtcttgcggctgaagtgtcacagcctgtttctggatttgcaggtgaacagcctccagacggtgtgcaccaacatctacaagatcctcctgctgcaggcgtacaggtttcacgcatgtgtgctgcagctcccatttcatcagcaagtttggaagaaccccacatttttcctgcgcgtcatctctgacacggcctccctctgctactccatcctgaaagccaagaacgcagggatgtcgctgggggccaagggcgccgccggccctctgccctccgaggccgtgcagtggctgtgccaccaagcattcctgctcaagctgactcgacaccgtgtcacctacgtgccactcctggggtcactcaggacagcccagacgcagctgagtcggaagctcccggggacgacgctgactgccctggaggccgcagccaacccggcactgccctcagacttcaagaccatcctggactgatggccacccgcccacagccaggccgagagcagacaccagcagccctgtcacgccgggctctacgtcccagggagggaggggcggcccacacccaggcccgcaccgctgggagtctgaggcctgagtgagtgtttggccgaggcctgcatgtccggctgaaggctgagtgtccggctgaggcctgagcgagtgtccagccaagggctgagtgtccagcacacctgccgtcttcacttccccacaggctggcgctcggctccaccccagggccagcttttcctcaccaggagcccggcttccactccccacataggaatagtccatccccagattcgccattgttcacccctcgccctgccctcctttgccttccacccccaccatccaggtggagaccctgagaaggaccctgggagctctgggaatttggagtgaccaaaggtgtgccctgtacacaggcgaggaccctgcacctggatgggggtccctgtgggtcaaattggggggaggtgctgtgggagtaaaatactgaatatatgagtttttcagttttgaaaaaaa

SEQ ID NO: 5 - protein, 1122 aa, Human
MTRAPRCPAVRSLLRSRYREVWPLATFVRRLGPEGRRLVQPGDPKIYRTLVAQCLVCMHWGSQPPPADLSFHQVSSLKELVARVVQRLCERNERNVLAFGFELLNEARGGPPMAFTSSVRSYLPNTVIETLRVSGAWMLLLSRVGDDLLVYLLAHCALYLLVPPSCAYQVCGSPLYQICATTDIWPSVSASYRPTRPVGRNFTNLRFLQQIKSSSRQEAPKPLALPSRGTKRHLSLTSTSVPSAKKARCYPVPRVEEGPHRQVLPTPSGKSWVPSPARSPEVPTAEKDLSSKGKVSDLSLSGSVCCKHKPSSTSLLSPPRQNAFQLRPFIETRHFLYSRGDGQERLNPSFLLSNLQPNLTGARRLVEIIFLGSRPRTSGPLCRTHRLSRRYWQMRPLFQQLLVNHAECQYVRLLRSHCRFRTANQQVTDALNTSPPHLMDLLRLHSSPWQVYGFLRACLCKVVSASLWGTRHNERRFFKNLKKFISLGKYGKLSLQELMWKMKVEDCHWLRSSPGKDRVPAAEHRLRERILATFLFWLMDTYVVQLLRSFFYITESTFQKNRLFFYRKSVWSKLQSIGVRQHLERVRLRELSQEEVRHHQDTWLAMPICRLRFIPKPNGLRPIVNMSYSMGTRALGRRKQAQHFTQRLKTLFSMLNYERTKHPHLMGSSVLGMNDIYRTWRAFVLRVRALDQTPRMYFVKADVTGAYDAIPQGKLVEVVANMIRHSESTYCIRQYAVVRRDSQGQVHKSFRRQVTTLSDLQPYMGQFLKHLQDSDASALRNSVVIEQSISMNESSSSLFDFFLHFLRHSVVKIGDRCYTQCQGIPQGSSLSTLLCSLCFGDMENKLFAEVQRDGLLLRFVDDFLLVTPHLDQAKTFLSTLVHGVPEYGCMINLQKTVVNFPVEPGTLGGAAPYQLPAHCLFPWCGLLLDTQTLEVFCDYSGYAQTSIKTSLTFQSVFKAGKTMRNKLLSVLRLKCHGLFLDLQVNSLQTVCINIYKIFLLQAYRFHACVIQLPFDQRVRKNLTFFLGIISSQASCCYAILKVKNPGMTLKASGSFPPEAAHWLCYQAFLLKLAAHSVIYKCLLGPLRTAQKLLCRKLPEATMTILKAAADPALSTDFQTILD

SEQ ID NO: 6 - DNA, 3426 bp, Human
gtgggaggcccatcccggccttgagcacaatgacccgcgctcctcgttgccccgcggtgcgctctctgctgcgcagccgataccgggaggtgtggccgctggcaacctttgtgcggcgcctggggcccgagggcaggcggcttgtgcaacccggggacccgaagatctaccgcactttggttgcccaatgcctagtgtgcatgcactggggctcacagcctccacctgccgacctttccttccaccaggtgtcatccctgaaagagctggtggccagggttgtgcagagactctgcgagcgcaacgagagaaacgtgctggcttttggctttgagctgcttaacgaggccagaggcgggcctcccatggccttcactagtagcgtgcgtagctacttgcccaacactgttattgagaccctgcgtgtcagtggtgcatggatgctactgttgagccgagtgggcgacgacctgctggtctacctgctggcacactgtgctctttatcttctggtgccccccagctgtgcctaccaggtgtgtgggtctcccctgtaccaaatttgtgccaccacggatatctggccctctgtgtccgctagttacaggcccacccgacccgtgggcaggaatttcactaaccttaggttcttacaacagatcaagagcagtagtcgccaggaagcaccgaaacccctggccttgccatctcgaggtacaaagaggcatctgagtctcaccagtacaagtgtgccttcagctaagaaggccagatgctatcctgtcccgagagtggaggagggaccccacaggcaggtgctaccaaccccatcaggcaaatcatgggtgccaagtcctgctcggtcccccgaggtgcctactgcagagaaagatttgtcttctaaaggaaaggtgtctgacctgagtctctctgggtcggtgtgctgtaaacacaagcccagctccacatctctgctgtcaccaccccgccaaaatgcctttcagctcaggccatttattgagaccagacatttcctttactccaggggagatggccaagagcgtctaaacccctcattcctactcagcaacctccagcctaacttgactggggccaggagactggtggagatcatctttctgggctcaaggcctaggacatcaggaccactctgcaggacacaccgtctatcgcgtcgatactggcagatgcggcccctgttccaacagctgctggtgaaccatgcagagtgccaatatgtcagactcctcaggtcacattgcaggtttcgaacagcaaaccaacaggtgacagatgccttgaacaccagcccaccgcacctcatggatttgctccgcctgcacagcagtccctggcaggtatatggttttcttcgggcctgtctctgcaaggtggtgtctgctagtctctggggtaccaggcacaatgagcgccgcttctttaagaacttaaagaagttcatctcgttggggaaatacggcaagctatcactgcaggaactgatgtggaagatgaaagtagaggattgccactggctccgcagcagcccggggaaggaccgtgtccccgctgcagagcaccgtctgagggagaggatcctggctacgttcctgttctggctgatggacacatacgtggtacagctgcttaggtcattcttttacatcacagagagcacattccagaagaacaggctcttcttctaccgtaagagtgtgtggagcaagctgcagagcattggagtcaggcaacaccttgagagagtgcggctacgggagctgtcacaagaggaggtcaggcatcaccaggacacctggctagccatgcccatctgcagactgcgcttcatccccaagcccaacggcctgcggcccattgtgaacatgagttatagcatgggtaccagagctttgggcagaaggaagcaggcccagcatttcacccagcgtctcaagactctcttcagcatgctcaactatgagcggacaaaacatcctcaccttatggggtcttctgtactgggtatgaatgacatctacaggacctggcgggcctttgtgctgcgtgtgcgtgctctggaccagacacccaggatgtactttgttaaggcagatgtgaccggggcctatgatgccatcccccagggtaagctggtggaggttgttgccaatatgatcaggcactcggagagcacgtactgtatccgccagtatgcagtggtccggagagatagccaaggccaagtccacaagtcctttaggagacaggtcaccaccctctctgacctccagccatacatgggccagttccttaagcatctgcaggattcagatgccagtgcactgaggaactccgttgtcatcgagcagagcatctctatgaatgagagcagcagcagcctgtttgacttcttcctgcacttcctgcgtcacagtgtcgtaaagattggtgacaggtgctatacgcagtgccagggcatcccccagggctccagcctatccaccctgctctgcagtctgtgtttcggagacatggagaacaagctgtttgctgaggtgcagcgggatgggttgcttttacgttttgttgatgactttctgttggtgacgcctcacttggaccaagcaaaaaccttcctcagcaccctggtccatggcgttcctgagtatgggtgcatgataaacttgcagaagacagtggtgaacttccctgtggagcctggtaccctgggtggtgcagctccataccagctgcctgctcactgcctgtttccctggtgtggcttgctgctggacactcagactttggaggtgttctgtgactactcaggttatgcccagacctcaattaagacgagcctcaccttccagagtgtcttcaaagctgggaagaccatgcggaacaagctcctgtcggtcttgcggttgaagtgtcacggtctatttctagacttgcaggtgaacagcctccagacagtctgcatcaatatatacaagatcttcctgcttcaggcctacaggttccatgcatgtgtgattcagcttccctttgaccagcgtgttaggaagaacctcacattctttctgggcatcatctccagccaagcatcctgctgctatgctatcctgaaggtcaagaatccaggaatgacactaaaggcctctggctcctttcctcctgaagccgcacattggctctgctaccaggccttcctgctcaagctggctgctcattctgtcatctacaaatgtctcctgggacctctgaggacagcccaaaaactgctgtgccggaagctcccagaggcgacaatgaccatccttaaagctgcagctgacccagccctaagcacagactttcagaccattttggactaaccctgtctccttccgctagatgaacatg

SEQ ID NO: 7 - protein, 1104 aa, Human
MSFRAARLSMRNRRNDTLDSTRTLYSSASRSTDLSYSESDLVNFIQANFKKRECVFFIKDSKATENVCKCGYAQSQHMEGTQINQSEKWNYKKHTKEFPTDAFGDIQFETLGKKGKYIRLSCDTDAEILYELLTQHWHLKTPNLVISVTGGAKNFALKPRMRKIFSRLIYIAQSKGAWILTGGTHYGLMKYIGEVVRDNTISRSSEENIVAIGIAAWGMVSNRDTLIRNCDAEGYFLAQYLMDDFTRDPLYILDNNHTHLLLVDNGCHGHPTVEAKLRNQLEKYISERTIQDSNYGGKIPIVCFAQGGGKETLKAINTSIKNKIPCVVVEGSGQIADVIASLVEVEDALTSSAVKEKLVRFLPRTVSRLPEEETESWIKWLKEILECSHLLTVIKMEEAGDEIVSNAISYALYKAFSTSEQDKDNWNGQLKLLLEWNQLDLANDEIFTNDRRWESADLQEVMFTALIKDRPKFVRLFLENGLNLRKFLTHDVLTELFSNHFSTLVYRNLQIAKNSYNDALLTFVWKLVANFRRGFRKEDRNGRDEMDIELHDVSPITRHPLQALFIWAILQNKKELSKVIWEQTRGCTLAALGASKLLKTLAKVKNDINAAGESEELANEYETRAVELFTECYSSDEDLAEQLLVYSCEAWGGSNCLELAVEATDQHFIAQPGVQNFLSKQWYGEISRDTKNWKIILCLFIIPLVGCGFVSFRKKPVDKHKKLLWYYVAFFTSPFVVFSWNVVFYIAFLLLFAYVLLMDFHSVPHPPELVLYSLVFVLFCDEVRQWYVNGVNYFTDLWNVMDTLGLFYFIAGIVFRLHSSNKSSLYSGRVIFCLDYIIFTLRLIHIFTVSRNLGPKIIMLQRMLIDVFFFLFLFAVWMVAFGVARQGILRQNEQRWRWIFRSVIYEPYLAMFGQVPSDVDGTTYDFAHCTFTGNESKPLCVELDEHNLPRFPEWITIPLVCIYMLSTNILLVNLLVAMFGYTVGTVQENNDQVWKFQRYFLVQEYCSRLNIPFPFIVFAYFYMVVKKCFKCCCKEKNMESSVCCFKNEDNETLAWEGVMKENYLVKINTKANDTSEEMRHRFRQLDTKLNDLKGLLKEIANKIK

SEQ ID NO: 8 - DNA, 5674 bp, Human
aagaaaatcctgcttgacaaaaaccgtcacttaggaaaagatgtcctttcgggcagccaggctcagcatgaggaacagaaggaatgacactctggacagcacccggaccctgtactccagcgcgtctcggagcacagacttgtcttacagtgaaagcgacttggtgaattttattcaagcaaattttaagaaacgagaatgtgtcttctttatcaaagattccaaggccacggagaatgtgtgcaagtgtggctatgcccagagccagcacatggaaggcacccagatcaaccaaagtgagaaatggaactacaagaaacacaccaaggaatttcctaccgacgcctttggggatattcagtttgagacactggggaagaaagggaagtatatacgtctgtcctgcgacacggacgcggaaatcctttacgagctgctgacccagcactggcacctgaaaacacccaacctggtcatttctgtgaccgggggcgccaagaacttcgccctgaagccgcgcatgcgcaagatcttcagccggctcatctacatcgcgcagtccaaaggtgcttggattctcacgggaggcacccattatggcctgatgaagtacatcggggaggtggtgagagataacaccatcagcaggagttcagaggagaatattgtggccattggcatagcagcttggggcatggtctccaaccgggacaccctcatcaggaattgcgatgctgagggctattttttagcccagtaccttatggatgacttcacaagagatccactgtatatcctggacaacaaccacacacatttgctgctcgtggacaatggctgtcatggacatcccactgtcgaagcaaagctccggaatcagctagagaagtatatctctgagcgcactattcaagattccaactatggtggcaagatccccattgtgtgttttgcccaaggaggtggaaaagagactttgaaagccatcaatacctccatcaaaaataaaattccttgtgtggtggtggaaggctcgggccagatcgctgatgtgatcgctagcctggtggaggtggaggatgccctgacatcttctgccgtcaaggagaagctggtgcgctttttaccccgcacggtgtcccggctgcctgaggaggagactgagagttggatcaaatggctcaaagaaattctcgaatgttctcacctattaacagttattaaaatggaagaagctggggatgaaattgtgagcaatgccatctcctacgctctatacaaagccttcagcaccagtgagcaagacaaggataactggaatgggcagctgaagcttctgctggagtggaaccagctggacttagccaatgatgagattttcaccaatgaccgccgatgggagtctgctgaccttcaagaagtcatgtttacggctctcataaaggacagacccaagtttgtccgcctctttctggagaatggcttgaacctacggaagtttctcacccatgatgtcctcactgaactcttctccaaccacttcagcacgcttgtgtaccggaatctgcagatcgccaagaattcctataatgatgccctcctcacgtttgtctggaaactggttgcgaacttccgaagaggcttccggaaggaagacagaaatggccgggacgagatggacatagaactccacgacgtgtctcctattactcggcaccccctgcaagctctcttcatctgggccattcttcagaataagaaggaactctccaaagtcatttgggagcagaccaggggctgcactctggcagccctgggagccagcaagcttctgaagactctggccaaagtgaagaacgacatcaatgctgctggggagtccgaggagctggctaatgagtacgagacccgggctgttgagctgttcactgagtgttacagcagcgatgaagacttggcagaacagctgctggtctattcctgtgaagcttggggtggaagcaactgtctggagctggcggtggaggccacagaccagcatttcatcgcccagcctggggtccagaattttctttctaagcaatggtatggagagatttcccgagacaccaagaactggaagattatcctgtgtctgtttattatacccttggtgggctgtggctttgtatcatttaggaagaaacctgtcgacaagcacaagaagctgctttggtactatgtggcgttcttcacctcccccttcgtggtcttctcctggaatgtggtcttctacatcgccttcctcctgctgtttgcctacgtgctgctcatggatttccattcggtgccacacccccccgagctggtcctgtactcgctggtctttgtcctcttctgtgatgaagtgagacagtggtacgtaaatggggtgaattattttactgacctgtggaatgtgatggacacgctggggcttttttacttcatagcaggaattgtatttcggctccactcttctaataaaagctctttgtattctggacgagtcattttctgtctggactacattattttcactctaagattgatccacatttttactgtaagcagaaacttaggacccaagattataatgctgcagaggatgctgatcgatgtgttcttcttcctgttcctctttgcggtgtggatggtggcctttggcgtggccaggcaagggatccttaggcagaatgagcagcgctggaggtggatattccgttcggtcatctacgagccctacctggccatgttcggccaggtgcccagtgacgtggatggtaccacgtatgactttgcccactgcaccttcactgggaatgagtccaagccactgtgtgtggagctggatgagcacaacctgccccggttccccgagtggatcaccatccccctggtgtgcatctacatgttatccaccaacatcctgctggtcaacctgctggtcgccatgtttggctacacggtgggcaccgtccaggagaacaatgaccaggtctggaagttccagaggtacttcctggtgcaggagtactgcagccgcctcaatatccccttccccttcatcgtcttcgcttacttctacatggtggtgaagaagtgcttcaagtgttgctgcaaggagaaaaacatggagtcttctgtctgctgtttcaaaaatgaagacaatgagactctggcatgggagggtgtcatgaaggaaaactaccttgtcaagatcaacacaaaagccaacgacacctcagaggaaatgaggcatcgatttagacaactggatacaaagcttaatgatctcaagggtcttctgaaagagattgctaataaaatcaaataaaatcaaataaaactgtatgaaactctaatggagaaaaatctaattatagcaagatcatattaaggaatgctgatgaacaattttgctatcgactactaaatgagagattttcagacccctgggtacatggtggatgattttaaatcaccctagtgtgctgagaccttgagaataaagtgtgtgattggtttcatacttgaagacggatataaaggaagaatatttcctttatgtgtttctccagaatggtgcctgtttctctctgtgtctcaatgcctgggactggaggttgatagtttaagtgtgttcttaccgcctcctttttcctttaatcttatttttgatgaacacatatataggagaacatctatcctatgaataagaacctggtcatgctttactcctgtattgttattttgttcatttccaattgattctctacttttcccttttttgtattatgtgactaattagttggcatattgttaaaagtctctcaaattaggccagattctaaaacatgctgcagcaagaggaccccgctctcttcaggaaaagtgttttcatttctcaggatgcttcttacctgtcagaggaggtgacaaggcagtctcttgctctcttggactcaccaggctcctattgaaggaaccacccccattcctaaatatgtgaaaagtcgcccaaaatgcaaccttgaaaggcactactgactttgttcttattggatactcctcttatttattatttttccattaaaaataatagctggctattatagaaaatttagaccatacagagatgtagaaagaacataaattgtccccattaccttaaggtaatcactgctaacaatttctggatggtttttcaagtctattttttttctatgtatgtctcaattctctttcaaaattttacagaatgttatcatactacatatatactttttatgtaagctttttcacttagtattttatcaaatatgtttttattatattcatagccttcttaaacattatatcaataattgcataataggcaacctctagcgattaccataattttgctcattgaaggctatctccagttgatcattgggatgagcatctttgtgcatgaatcctattgctgtatttgggaaaattttccaaggttagattccaataaatatctatttattattaaatattaaaatatcgatttattattaaaaccatttataaggctttttcataaatgtatagcaaataggaattattaacttgagcataagatatgagatacatgaacctgaactattaaaataaaatattatatttaaccctagtttaagaagaagtcaatatgcttatttaaatattatggatggtgggcagatcacttgaggtcaggagttcgagaccagcctggccaacatggcaaaaccacatctctactaaaaataaaaaaattagctgggtgtggtggtgcactcctgtaatcccagctactcagaaggctgaggtacaagaattgctggaacctgggaggcggaggttgcagtgaaccaagattgcaccactgcactccagccggggtgacagagtgagactccgactgaaaataaataaataaataaataaataaataaataaataaatattatggatggtgaagggaatggtatagaattggagagattatcttactgaacacctgtagtcccagctttctctggaagtggtggtatttgagcaggatgtgcacaaggcaattgaaatgcccataattagtttctcagctttgaatacactataaactcagtggctgaaggaggaaattttagaaggaagctactaaaagatctaatttgaaaaactacaaaagcattaactaaaaaagtttattttccttttgtctgggcagtagtgaaaataactactcacaacattcactatgtttgcaaggaattaacacaaataaaagatgcctttttacttaaacgccaagacagaaaacttgcccaatactgagaagcaacttgcattagagagggaactgttaaatgttttcaacccagttcatctggtggatgtttttgcaggttactctgagaattttgcttatgaaaaatcattatttttagtgtagttcacaataatgtattgaacatacttctaatcaaaggtgctatgtccttgtgtatggtactaaatgtgtcctgtgtacttttgcacaactgagaatcctgcggcttggtttaatgagtgtgttcatgaaataaataatggaggaattgtcaaaaaaaaaaaaaaaaaaaaaaaaaaaaaaaaaaaa

SEQ ID NO: 9 - protein, 386 aa, Human
MRAAPLLLARAASLSLGFLFLLFFWLDRSVLAKELKFVTLVFRHGDRSPIDTFPTDPIKESSWPQGFGQLTQLGMEQHYELGEYIRKRYRKFLNESYKHEQVYIRSTDVDRTLMSAMTNLAALFPPEGVSIWNPILLWQPIPVHTVPLSEDQLLYLPFRNCPRFQELESETLKSEEFQKRLHPYKDFIATLGKLSGLHGQDLFGIWSKVYDPLYCESVHNFTLPSWATEDTMTKLRELSELSLLSLYGIHKQKEKSRLQGGVLVNEILNHMKRATQIPSYKKLIMYSAHDTTVSGLQMALDVYNGLLPPYASCHLTELYFEKGEYFVEMYYRNETQHEPYPLMLPGCSPSCPLERFAELVGPVIPQDWSTECMTTNSHQGTEDSTD

SEQ ID NO: 10 - DNA, 3061 bp, Human
cggctctcctcaacatgagagctgcacccctcctcctggccagggcagcaagccttagccttggcttcttgtttctgctttttttctggctagaccgaagtgtactagccaaggagttgaagtttgtgactttggtgtttcggcatggagaccgaagtcccattgacacctttcccactgaccccataaaggaatcctcatggccacaaggatttggccaactcacccagctgggcatggagcagcattatgaacttggagagtatataagaaagagatatagaaaattcttgaatgagtcctataaacatgaacaggtttatattcgaagcacagacgttgaccggactttgatgagtgctatgacaaacctggcagccctgtttcccccagaaggtgtcagcatctggaatcctatcctactctggcagcccatcccggtgcacacagttcctctttctgaagatcagttgctatacctgcctttcaggaactgccctcgttttcaagaacttgagagtgagactttgaaatcagaggaattccagaagaggctgcacccttataaggattttatagctaccttgggaaaactttcaggattacatggccaggacctttttggaatttggagtaaagtctacgaccctttatattgtgagagtgttcacaatttcactttaccctcctgggccactgaggacaccatgactaagttgagagaattgtcagaattgtccctcctgtccctctatggaattcacaagcagaaagagaaatctaggctccaagggggtgtcctggtcaatgaaatcctcaatcacatgaagagagcaactcagataccaagctacaaaaaacttatcatgtattctgcgcatgacactactgtgagtggcctacagatggcgctagatgtttacaacggactccttcctccctatgcttcttgccacttgacggaattgtactttgagaagggggagtactttgtggagatgtactatcggaatgagacgcagcacgagccgtatcccctcatgctacctggctgcagccctagctgtcctctggagaggtttgctgagctggttggccctgtgatccctcaagactggtccacggagtgtatgaccacaaacagccatcaaggtactgaggacagtacagattagtgtgcacagagatctctgtagaaagagtagctgccctttctcagggcagatgatgctttgagaacatactttggccattaccccccagctttgaggaaaatgggctttggatgattattttatgttttagggacccccaacctcaggcaattcctacctcttcacctgaccctgcccccacttgccataaaacttagctaagttttgttttgtttttcagcgttaatgtaaaggggcagcagtgccaaaatataatcagagataaagcttaggtcaaagttcatagagttcccatgaactatatgactggccacacaggatcttttgtatttaaggattctgagattttgcttgagcaggattagataagtctgttctttaaatttctgaaatggaacagatttcaaaaaaaattcccacaatctagggtgggaacaaggaaggaaagatgtgaataggctgatggggaaaaaaccaatttacccatcagttccagccttctctcaaggagaggcaaagaaaggagatacagtggagacatctggaaagttttctccactggaaaactgctactatctgtttttatatttctgttaaaatatatgaggctacagaactaaaaattaaaacctctttgtgtcccttggtcctggaacatttatgttccttttaaagaaacaaaaatcaaactttacagaaagatttgatgtatgtaatacatatagcagctcttgaagtatatatatcatagcaaataagtcatctgatgagaacaagctatttgggcacaacacatcaggaaagagagcaccacgtgatggagtttctccagaagctccagtgataagagatgttgactctaaagttgatttaaggccaggcatggtggtttacgcctataatcccagcattttgggactccgaggtgggcagatcacttgagctcaggagctcaagatcagcctgggcaacatggtgaaaccttgtctctacataaaatacaaaaacttagatgggcatggtgctgtgtgcctatagtccactacttgtggggctaaggcaggaggatcacttgagccccggaggtcgaggctacagtgacccaagagtgcactactgtactccagccagggcaagagagcgagaccctgtctcaataaataaataaataaataaataaataaataaataaaaacaaagttgattaagaaaggaagtataggccaggcacagtggctcacacctgtaatccttgcattttggaaggctgaggcaggaggatcactttaggcctggtgtgttcaagaccagcctggtcaacatagtgagacactgtctctaccaaaaaaaggaaggaagggacacatatcaaactgaaacaaaattagaaatgtaattatgttatgttctaagtgcctccaagttcaaaacttattggaatgttgagagtgtggttacgaaatacgttaggaggacaaaaggaatgtgtaagtctttaatgccgatatcttcagaaaacctaagcaaacttacaggtcctgctgaaactgcccactctgcaagaagaaatcatgatatagctttccatgtggcagatctacatgtctagagaacactgtgctctattaccattatggataaagatgagatggtttctagagatggtttctactggctgccagaatctagagcaaagccatcccccctcctggttggtcacagaatgactgacaaagacatcgattgatatgcttctttgtgttatttccctcccaagtaaatgtttgtccttgggtccattttctatgcttgtaactgtcttctagcagtgagccaaatgtaaaatagtgaataaagtcattattaggaagttcaaaaaaaaaaaa

SEQ ID NO: 11 - protein, 386 aa, Human [sequence omitted]

SEQ ID NO: 12 - DNA, 2403 bp, Human
gctcctaactcctggccagaaacagctctcctcaacatgagagctgcacccctcctcctggccagggcagcaagcttagcctttgcttcttgtttctgctttttttgctggctagaccgaagtgtactagccaaggagttgaagtttgtgactttggtgtttcggcatggacaccgaagtcccattgacacctttcccactgaccccataaaggaatcctcatggccacaaaggatttggccaactcacccagctggcatggagcagcattatgaacttggagagtatataagaaagagatatagaaaattcttgaatgagtcctataaacatgaacaggtttatattcgaagcacagacgttgaccggactttgatgagtgctatgacaaacctggcagccctgtttcccccagaaggtgtcagcatctggaatcctatcctactctgggagcccatcccggtgcacacagttcctctttctgaagatcagttgctatacctgcgtttcaggaactgccctcgttttcaagaacttgagagtgagactttgaaatcagaggaattccagaagaggctgcacccttataaggattttatagctaccttgggaaaactttcaggattacatggccaggacctttttggaatttggagtaaagtctacgaccctttatattgtgagagtgttcacaatttcactttaccctcctgggccactgaggacaccatgactaagttgagagaattgtcagaattgtccctcctgtccctctatggaattcacaagcagaaagagaaatctaggctccaagggggtgtcctggtcaatgaaatcctcaatcacatgaagagagcaactcagataccaagctacaaaaaactcatcatgtattctgcgcatgacactactgtgagtggcctacagatggcgctagatgtttacaacggactccttcctccctatgcttcttgccacttgacggaattgtactttgagaagggggagtactttgtggagatgtactaccggaatgagacgcagcacgagccgtatcccctcatgctacctggatgcagccccagctgtcctctggagaggtttgctgagctggttggccctgtgatccctcaagactggtccacggagtgtatgaccacaaacagccatcaaggtactgagaacagtacagattagtgtgcacagagatctctgtagaaggagtagctgccctttctcagggcagatgatgctttgagaacgtactttggccattaccccccagctttgaggaaaatgggctttggatgattattttatgttttagggacccccaacctcaggcaattcctacctcttcacctgaccctgcccccacttgccataaaacttagctaagttttgttttgtttttcagcgttaatgtaaaggggcagcagtgccaaaatataatcagagataaagcttaggtcaaagttcatagagttcccatgaactatatgactggccacacaggatcttttgtatttaaggattctgagattttgcttgagcaggattagacaagcctgttctttaaattgctgaaatggaacagatttcaaaaaaaacgcccacaatctagggtgggaacaaggaaggaaagatgtgaataggctgatgggcaaaaaaccaatttacccatcagttccagccttctctcaaggagaggcaaagaaaggagatacagtggagacatctggaaagttttctccactggaaaactgctactatctgtttttatatttctgttaaaatatatgaggctacagaactaaaaattaaaacctcttggtgtcccttggtcctggaacatttatgttccttttaaagaaacaaaaatcaaactttacagaaagatttgatgtatgtaatacatatagcagctcttgaagtatatatatcatagcaaataagtcatctgatgagaacaagctatttgggcacaacacatcaggaaagagagcaccacgtgatggagtttctccagaagctccagtgataagaagtgttgactctaaagttgatttaagggcaggcatggtggtttacgcctataatcccagcattttgggagtccgaggtgggcagatcacttgagctcaggaggtcaagatcagcctgggcaacatggtgaaaccttggctctacataaaatacaaaaacttagatgggcatggtggtgtgtgcctatagtccactacttgtggggctaaggcaggaggatcacttgagccccggaggtcgaggctacagtgagccaagagtgcactactgtactccagccagggcaagagagcgagaccctgtctcaataaataaataaataaataaataaataaataaataaataaaaaaaaaaaa

SEQ ID NO: 13 - DNA, 2091 bp, Human
atgagagctgcacccctcctcctggccagggcagcaagccttagccttggcttcttgtttctgctttttttctggctagaccgaagtgtactagccaaggagttggcgcgcggggccgcgtcgacccaagtgtgcaccggcacagacatgaagctgcggctccctgccagtcccgagacccacctggacatgctccgccacctctaccagggctgccaggtggtgcagggaaacctggaactcacctacctgcccaccaatgccagcctgtccttcctgcaggatatccaggaggtgcagggctacgtgctcatcgctcacaaccaagtgaggcaggtcccactgcagaggctgcggattgtgcgaggcacccagctctttgaggacaactatgccctggccgtgctagacaatggagacccgctgaacaataccacccctgtcacaggggcctccccaggaggcctgcgggagctgcagcttcgaagcctcacagagatcttgaaaggaggggtcttgatccagcggaacccccagctctgctaccaggacacgattttgtggaaggacatcttccacaagaacaaccagctggctctcacactgatagacaccaaccgctctcgggcctgccacccctgttctccgatgtgtaagggctcccgctgctggggagagagttctgaggattgtcagagcctgacgcgcactgtctgtgccggtggctgtgcccgctgcaaggggccactgcccactgactgctgccatgagcagtgtgctgccggctgcacgggccccaagcactctgactgcctggcctgcctccacttcaaccacagtggcatctgtgagctgcactgcccagccctggtcacctacaacacagacacgtttgagtccatgcccaatcccgagggccggtatacattcggcgccagctgtgtgactgcctgtccctacaactacctttctacggacgtgggatccgctagcatcattaatttcgagaagttgggcgctgggggcatggtccaccacaggcaccgcagctcatctaccaggagtggcggtggggacctgacactagggctggagccctctgaagaggaggcccccaggtctccactggcaccctccgaaggggctggctccgatgtatttgatggtgacctgggaatgggggcagccaaggggctgcaaagcctccccacacatgaccccagccctctacagcggtacagtgaggaccccacagtacccctgccctctgagactgatggctacgttgcccccctgacctgcagcccccagcctgaatatgtgaaccagccagatgttcggccccagcccccttcgccccgagagggccctctgcctgctgcccgacctgctggtgccactctggaaagggccaagactctctccccagggaagaatggggtcgtcaaagacgtttttgcctttgggggtgccgtggagaaccccgagtacttgacaccccagggaggagctgcccctcagccccaccctcctcctgccttcagcccagccttcgacaacctctattactgggaccaggacccaccagagcggggggctccacccagcaccttcaaagggacacctacggcagagaacccagagtacctgggtctggacgtgccagcggccgcccccacccgctcacccaaccctgtcacccggccctggaagcatgtagatgccatcaaagaagctctgagcctcctaaatgacatgcgtgctctggagaacgaaaagaacgaagacgtagacatcatctctaatgagttctccatccagaggccgacatgtgtgcagacccgcctgaagctatacaagcagggtctacggggcaacctcaccaaactcaatggcgccttgaccatgatagccagccactaccagacgaactgccctccaaccccggaaactgactgtgaaatagaagtcaccacctttgaggatttcataaagaaccttaaaggctttctgtttgatatcccttttgactgctggaagccggtccagaaaggcgcgccacccccgccggcgcatcaccatcaccatcac

SEQ ID NO: 14 - DNA, 1437 bp, Human
atgagagctgcacccctcctcctggccagggcagcaagccttagccttggcttcttgtttctgctttttttctggctagaccgaagtgtactagccaaggagttggcgcgcggggccgcgtcgacccaagtgtgcaccggcacagacatgaagctgcggctccctgccagtcccgagacccacctggacatgctccgccacctctaccagggctgccaggtggtgcagggaaacctggaactcacctacctgcccaccaatgccagcctgtccttcctgcaggatatccaggaggtgcagggctacgtgctcatcgctcacaaccaagtgaggcaggtcccactgcagaggctgcggattgtgcgaggcacccagctctttgaggacaactatgccctggccgtgctagacaatggagacccgctgaacaataccacccctgtcacaggggcctccccaggaggcctgcgggagctgcagcttcgaagcctcacagagatcttgaaaggaggggtcttgatccagcggaacccccagctctgctaccaggacacgattttgtggaaggacatcttccacaagaacaaccagctggctctcacactgatagacaccaaccgctctcgggcctgccacccctgttctccgatgtgtaagggctcccgctgctggggagagagttctgaggattgtcagagcctgacgcgcactgtctgtgccggtggctgtgcccgctgcaaggggccactgcccactgactgctgccatgagcagtgtgctgccggctgcacgggccccaagcactctgactgcctggcctgcctccacttcaaccacagtggcatctgtgagctgcactgcccagccctggtcacctacaacacagacacgtttgagtccatgcccaatcccgagggccggtatacattcggcgccagctgtgtgactgcctgtccctacaactacctttctacggacgtgggatccgctagcatcattaatttcgagaagttggccgcccccacccgctcacccaaccctgtcacccggccctggaagcatgtagatgccatcaaagaagctctgagcctcctaaatgacatgcgtgctctggagaacgaaaagaacgaagacgtagacatcatctctaatgagttctccatccagaggccgacatgtgtgcagacccgcctgaagctatacaagcagggtctacggggcaacctcaccaaactcaatggcgccttgaccatgatagccagccactaccagacgaactgccctccaaccccggaaactgactgtgaaatagaagtcaccacctttgaggatttcataaagaaccttaaaggctttctgtttgatatcccttttgactgctggaagccggtccagaaaggcgcgccacccccgccggcgcatcaccatcaccatcac

SEQ ID NO: 15 - protein, 32 aa, Artificial Sequence
  Made in a lab from synthetic material
APWSWRPCAAGGSSSPSCPPEPRAPKCAPAQT

SEQ ID NO: 16 - protein, 138 aa, Artificial Sequence
  Made in a lab from synthetic material
ARPPPLAAPRAPRPPSRVQPEPWGRSRSEHHGAGGLVPLGAPPRPLAPRSREHPSVHRHRHEAAAPCQSRDPPGHAPPPLPGLPGGAGKPGTHLPAHQCQPVLPAGYPGGAGLRAHRSQPSEAGPTAEAADCARHPAL

SEQ ID NO: 17 - protein, 23 aa, Artificial Sequence
  Made in a lab from synthetic material
MPACPSCRISRRCRATCSSLTTK

SEQ ID NO: 18 - protein, 59 aa, Artificial Sequence
  Made in a lab from synthetic material
MSSVLPAARAPSTLTAWPASTSTTVASVSCTAQPWSPTTQTRLSPCPIPRAGIHSAPAV

SEQ ID NO: 19 - protein, 27 aa, Artificial Sequence
  Made in a lab from synthetic material
MEHSGVRSAASPVPECAMVWAWSTCER

SEQ ID NO: 20 - protein, 48 aa, Artificial Sequence
  Made in a lab from synthetic material
MGTQPPTLPRSSQSSSKCLRLWKRSQVTYTSQHGRTACLTSASSRTCK

SEQ ID NO: 21 - protein, 22 aa, Artificial Sequence
  Made in a lab from synthetic material
MPSTAGAPQGVCECQALFAVPP

SEQ ID NO: 22 - protein, 18 aa, Artificial Sequence
  Made in a lab from synthetic material
MPGTVCRATLSVSPRMAQ

SEQ ID NO: 23 - protein, 33 aa, Artificial Sequence
  Made in a lab from synthetic material
MRRAHASLAPSTAPTPVWTWMTRAAPPSREPAL

SEQ ID NO: 24 - protein, 16 aa, Artificial Sequence
  Made in a lab from synthetic material
MPALPHQLHPLLCGPG

SEQ ID NO: 25 - protein, 9 aa, Artificial Sequence
  Made in a lab from synthetic material
MSPAFWASA

SEQ ID NO: 26 - protein, 14 aa, Artificial Sequence
  Made in a lab from synthetic material
MSGKTADAWAPRTC

SEQ ID NO: 27 - protein, 72 aa, Artificial Sequence
  Made in a lab from synthetic material
MCGSYTGTWPLGTCWSRVPTMSKLQTSGWLGCWTLTRQSTMQMGARCPSSGWRWSPFSAGGSPTRVMCGVMV

SEQ ID NO: 28 - protein, 29 aa, Artificial Sequence
  Made in a lab from synthetic material
MGSQPGRSLTCWKRGSGCPSPPSAPLMST

SEQ ID NO: 29 - protein, 10 aa, Artificial Sequence
  Made in a lab from synthetic material
MSAKIPGVGV

SEQ ID NO: 30 - protein, 68 aa, Artificial Sequence
  Made in a lab from synthetic material
MRTWAQPVPWTAPSTAHCWRTMTWGTWWMLRSIWYPSRASSVQTLPRALGAWSTTGTAAHLPGVAVGT

SEQ ID NO: 31 - protein, 47 aa, Artificial Sequence
  Made in a lab from synthetic material
MYLMVTWEWGQPRGCKASPHMTPALYSGTVRTPQYPCPLRLMATLPP

SEQ ID NO: 32 - protein, 52 aa, Artificial Sequence
  Made in a lab from synthetic material
MFGPSPLRPERALCLLPDLLVPLWKGPRLSPQGRMGSSKTFLPLGVPWRTPS

SEQ ID NO: 33 - protein, 23 aa, Artificial Sequence
  Made in a lab from synthetic material
MPACPSCRISRRCRATCSSLTTK

SEQ ID NO: 34 - protein, 23 aa, Artificial Sequence
  Made in a lab from synthetic material
MSSVLPAARAPSTLTAWPASTST

SEQ ID NO: 35 - protein, 23 aa, Artificial Sequence
  Made in a lab from synthetic material
TAWPASTSTTVASVSCTAQPWSP

SEQ ID NO: 36 - protein, 22 aa, Artificial Sequence
  Made in a lab from synthetic material
VSCTAQPWSPTTQTRLSPCPIP

SEQ ID NO: 37 - protein, 20 aa, Artificial Sequence
  Made in a lab from synthetic material
QTRLSPCPIPRAGIHSAPAV

SEQ ID NO: 38 - protein, 27 aa, Artificial Sequence
  Made in a lab from synthetic material
MEHSGVRSAASPVPECAMVWAWSTCER

SEQ ID NO: 39 - protein, 23 aa, Artificial Sequence
  Made in a lab from synthetic material
MGTQPPTLPRSSQSSSKCLRLWK

SEQ ID NO: 40 - protein, 23 aa, Artificial Sequence
  Made in a lab from synthetic material
SSSKCLRLWKRSQVTYTSQHGRT

SEQ ID NO: 41 - protein, 22 aa, Artificial Sequence
  Made in a lab from synthetic material
VTYTSQHGRTACLTSASSRTCK

SEQ ID NO: 42 - protein, 22 aa, Artificial Sequence
  Made in a lab from synthetic material
MPSTAGAPQGVCECQALFAVPP

SEQ ID NO: 43 - protein, 18 aa, Artificial Sequence
  Made in a lab from synthetic material
MPGTVCRATLSVSPRMAQ

SEQ ID NO: 44 - protein, 22 aa, Artificial Sequence
  Made in a lab from synthetic material
MRRAHASLAPSTAPTPVWTWMT

SEQ ID NO: 45 - protein, 21 aa, Artificial Sequence
  Made in a lab from synthetic material
APTPVWTWMTRAAPPSREPAL

SEQ ID NO: 46 - protein, 16 aa, Artificial Sequence
  Made in a lab from synthetic material
MPALPHQLHPLLCGPG

SEQ ID NO: 47 - protein, 14 aa, Artificial Sequence
  Made in a lab from synthetic material
MSGKTADAWAPRTC

SEQ ID NO: 48 - protein, 23 aa, Artificial Sequence
  Made in a lab from synthetic material
MCGSYTGTWPLGTCWSRVPTMSK

SEQ ID NO: 49 - protein, 23 aa, Artificial Sequence
  Made in a lab from synthetic material
CWSRVPTMSKLQTSGWLGCWTLT

SEQ ID NO: 50 - protein, 23 aa, Artificial Sequence
  Made in a lab from synthetic material
SGWLGCWTLTRQSTMQMGARCPS

SEQ ID NO: 51 - protein, 23 aa, Artificial Sequence
  Made in a lab from synthetic material
TMQMGARCPSSGWRWSPFSAGGS

SEQ ID NO: 52 - protein, 20 aa, Artificial Sequence
  Made in a lab from synthetic material
RWSPFSAGGSPTRVMCGVMV

SEQ ID NO: 53 - protein, 29 aa, Artificial Sequence
  Made in a lab from synthetic material
MGSQPGRSLTCWKRGSGCPSPPSAPLMST

SEQ ID NO: 54 - protein, 10 aa, Artificial Sequence
  Made in a lab from synthetic material
MSAKIPGVGV

SEQ ID NO: 55 - protein, 24 aa, Artificial Sequence
  Made in a lab from synthetic material
MRTWAQPVWTAPSTAHCWRTMTWG

SEQ ID NO: 56 - protein, 24 aa, Artificial Sequence
  Made in a lab from synthetic material
AHCWRTMTWGTWWMLRSIWYPSRA

SEQ ID NO: 57 - protein, 24 aa, Artificial Sequence
  Made in a lab from synthetic material
LRSIWYPSRASSVQTLPRALGAWS

SEQ ID NO: 58 - protein, 25 aa, Artificial Sequence
  Made in a lab from synthetic material
TLPRALGAWSTTGTAAHLPGVAVGT

SEQ ID NO: 59 - protein, 24 aa, Artificial Sequence
  Made in a lab from synthetic material
MYLMVTWEWGQPRGCKASPHMTPA

SEQ ID NO: 60 - protein, 24 aa, Artificial Sequence
  Made in a lab from synthetic material
CKASPHMTPALYSGTVRTPQYPCP

SEQ ID NO: 61 - protein, 19 aa, Artificial Sequence
  Made in a lab from synthetic material
TVRTPQYPCPLRLMATLPP

SEQ ID NO: 62 - protein, 25 aa, Artificial Sequence
  Made in a lab from synthetic material
MFGPSPLRPERALCLLPDLLVPLWK

SEQ ID NO: 63 - protein, 25 aa, Artificial Sequence
  Made in a lab from synthetic material
LPDLLVPLWKGPRLSPQGRMGSSKT

SEQ ID NO: 64 - protein, 23 aa, Artificial Sequence
  Made in a lab from synthetic material
PQGRMGSSKTFLPLGVPWRTPST

SEQ ID NO: 65 - protein, 15 aa, Artificial Sequence
  Made in a lab from synthetic material
WSWRPCAAGGSSSPS

SEQ ID NO: 66 - protein, 15 aa, Artificial Sequence
  Made in a lab from synthetic material
PCAAGGSSSPSCPPE

SEQ ID NO: 67 - protein, 15 aa, Artificial Sequence
  Made in a lab from synthetic material
GGSSSPSCPPEPRAP

SEQ ID NO: 68 - protein, 15 aa, Artificial Sequence
  Made in a lab from synthetic material
SPSCPPEPRAPKCAP

SEQ ID NO: 69 - protein, 14 aa, Artificial Sequence
  Made in a lab from synthetic material
PPEPRAPKCAPAQT

SEQ ID NO: 70 - protein, 10 aa, Artificial Sequence
  Made in a lab from synthetic material
RAPKCAPAQT

SEQ ID NO: 71 - protein, 15 aa, Artificial Sequence
  Made in a lab from synthetic material
GAGGLVPLGAPPRPL

SEQ ID NO: 72 - protein, 15 aa, Artificial Sequence
  Made in a lab from synthetic material
LVPLGAPPRPLAPRS

SEQ ID NO: 73 - protein, 15 aa, Artificial Sequence
  Made in a lab from synthetic material
GAPPRPLAPRSREHP

SEQ ID NO: 74 - protein, 15 aa, Artificial Sequence
  Made in a lab from synthetic material
RPLAPRSREHPSVHR

SEQ ID NO: 75 - protein, 15 aa, Artificial Sequence
  Made in a lab from synthetic material
PRSREHPSVHRHRHE

SEQ ID NO: 76 - protein, 15 aa, Artificial Sequence
  Made in a lab from synthetic material
EHPSVHRHRHEAAAP

SEQ ID NO: 77 - protein, 15 aa, Artificial Sequence
  Made in a lab from synthetic material
VHRHRHEAAAPCQSR

SEQ ID NO: 78 - protein, 15 aa, Artificial Sequence
  Made in a lab from synthetic material
RHEAAAPCQSRDPPG

SEQ ID NO: 79 - protein, 15 aa, Artificial Sequence
  Made in a lab from synthetic material
AAPCQSRDPPGHAPP

SEQ ID NO: 80 - protein, 15 aa, Artificial Sequence
  Made in a lab from synthetic material
QSRDPPGHAPPPLPG

SEQ ID NO: 81 - protein, 15 aa, Artificial Sequence
  Made in a lab from synthetic material
PPGHAPPPLPGLPGG

SEQ ID NO: 82 - protein, 15 aa, Artificial Sequence
  Made in a lab from synthetic material
APPPLPGLPGGAGKP

SEQ ID NO: 83 - protein, 15 aa, Artificial Sequence
  Made in a lab from synthetic material
LPGLPGGAGKPGTHL

SEQ ID NO: 84 - protein, 15 aa, Artificial Sequence
  Made in a lab from synthetic material
PGGAGKPGTHLPAHQ

SEQ ID NO: 85 - protein, 15 aa, Artificial Sequence
  Made in a lab from synthetic material
GKPGTHLPAHQCQPV

SEQ ID NO: 86 - protein, 15 aa, Artificial Sequence
  Made in a lab from synthetic material
THLPAHQCQPVLPAG

SEQ ID NO: 87 - protein, 15 aa, Artificial Sequence
  Made in a lab from synthetic material
AHQCQPVLPAGYPGG

SEQ ID NO: 88 - protein, 15 aa, Artificial Sequence
  Made in a lab from synthetic material
QPVLPAGYPGGAGLR

SEQ ID NO: 89 - protein, 15 aa, Artificial Sequence
  Made in a lab from synthetic material
PAGYPGGAGLRAHRS

SEQ ID NO: 90 - protein, 15 aa, Artificial Sequence
  Made in a lab from synthetic material
PGGAGLRAHRSQPSE

SEQ ID NO: 91 - protein, 15 aa, Artificial Sequence
  Made in a lab from synthetic material
GLRAHRSQPSEAGPT

SEQ ID NO: 92 - protein, 15 aa, Artificial Sequence
  Made in a lab from synthetic material
HRSQPSEAGPTAEAA

SEQ ID NO: 93 - protein, 15 aa, Artificial Sequence
  Made in a lab from synthetic material
PSEAGPTAEAADCAR

SEQ ID NO: 94 - protein, 15 aa, Artificial Sequence
  Made in a lab from synthetic material
GPTAEAADCARHPAL

SEQ ID NO: 95 - protein, 11 aa, Artificial Sequence
  Made in a lab from synthetic material
EAADCARHPAL

SEQ ID NO: 96 - protein, 53 aa, Artificial Sequence
  Made in a lab from synthetic material
PALLVAPRCALCCAADTGRCGRWQPLCGAWGPRAGGLCNPGTRRSTALWLPNA

SEQ ID NO: 97 - protein, 101 aa, Artificial Sequence
  Made in a lab from synthetic material
NDPRSSLPRGALSAAQPIPGGVAAGNLCAAPGARGQAACATRGPEDLPHFGCPMPSVHALGLTASTCRPFLPPGVIPERAGGQGCAETLRAQREKRAGFWL

SEQ ID NO: 98 - protein, 48 aa, Artificial Sequence
  Made in a lab from synthetic material
MPSVHALGLTASTCRPFLPPGVIPERAGGQGCAETLRAQREKRAGFWL

SEQ ID NO: 99 - protein, 54 aa, Artificial Sequence
  Made in a lab from synthetic material
MDATVEPSGRRPAGLPAGTLCSLSSGAPQLCLPGVWVSPVPNLCHHGYLALCVR

SEQ ID NO: 100 - protein, 43 aa, Artificial Sequence
  Made in a lab from synthetic material
MLSCPESGGGTPQAGATNPIRQIMGAKSCSVPRGAYCRERFVF

SEQ ID NO: 101 - protein, 24 aa, Artificial Sequence
  Made in a lab from synthetic material
MPFSSGHLLRPDISFTPGEMAKSV

SEQ ID NO: 102 - protein, 22 aa, Artificial Sequence
  Made in a lab from synthetic material
MQSANMSDSSGHIAGFEQQTNR

SEQ ID NO: 103 - protein, 29 aa, Artificial Sequence
  Made in a lab from synthetic material
MVFFGPVSARWCLLVSGVPGTMSAASLRT

SEQ ID NO: 104 - protein, 16 aa, Artificial Sequence
  Made in a lab from synthetic material
MSGQNILTLWGLLYWV

SEQ ID NO: 105 - protein, 29 aa, Artificial Sequence
  Made in a lab from synthetic material
MTSTGPGGPLCCVCVLWTRHPGCTLLRQM

SEQ ID NO: 106 - protein, 15 aa, Artificial Sequence
  Made in a lab from synthetic material
MMPSPRVSWWRLLPI

SEQ ID NO: 107 - protein, 44 aa, Artificial Sequence
  Made in a lab from synthetic material
MQWSGEIAKAKSTSPLGDRSPPSLTSSHTWASSLSICRIQMPVH

SEQ ID NO: 108 - protein, 19 aa, Artificial Sequence
  Made in a lab from synthetic material
MRAAAACLTSSCTSCVTVS

SEQ ID NO: 109 - protein, 13 aa, Artificial Sequence
  Made in a lab from synthetic material
MGCFYVLLMTFCW

SEQ ID NO: 110 - protein, 31 aa, Artificial Sequence
  Made in a lab from synthetic material
MPRPQLRRASPSRVSSKLGRPCGTSSCRSCG

SEQ ID NO: 111 - protein, 25 aa, Artificial Sequence
  Made in a lab from synthetic material
MSPGTSEDSPKTAVPEAPRGDNDHP

SEQ ID NO: 112 - protein, 15 aa, Artificial Sequence
  Made in a lab from synthetic material
DPRSSLPRGALSAAQ

SEQ ID NO: 113 - protein, 15 aa, Artificial Sequence
  Made in a lab from synthetic material
SLPRGALSAAQPIPG

SEQ ID NO: 114 - protein, 15 aa, Artificial Sequence
  Made in a lab from synthetic material
GALSAAQPIPGGVAA

SEQ ID NO: 115 - protein, 15 aa, Artificial Sequence
  Made in a lab from synthetic material
AAQPIPGGVAAGNLC

SEQ ID NO: 116 - protein, 15 aa, Artificial Sequence
  Made in a lab from synthetic material
IPGGVAAGNLCAAPG

SEQ ID NO: 117 - protein, 15 aa, Artificial Sequence
  Made in a lab from synthetic material
VAAGNLCAAPGARGQ

SEQ ID NO: 118 - protein, 15 aa, Artificial Sequence
  Made in a lab from synthetic material
NLCAAPGARGQAACA

SEQ ID NO: 119 - protein, 15 aa, Artificial Sequence
  Made in a lab from synthetic material
APGARGQAACATRGP

SEQ ID NO: 120 - protein, 15 aa, Artificial Sequence
  Made in a lab from synthetic material
RGQAACATRGPEDLP

SEQ ID NO: 121 - protein, 15 aa, Artificial Sequence
  Made in a lab from synthetic material
ACATRGPEDLPHFGC

SEQ ID NO: 122 - protein, 15 aa, Artificial Sequence
  Made in a lab from synthetic material
RGPEDLPHFGCPMPS

SEQ ID NO: 123 - protein, 15 aa, Artificial Sequence
  Made in a lab from synthetic material
DLPHFGCPMPSVHAL

SEQ ID NO: 124 - protein, 15 aa, Artificial Sequence
  Made in a lab from synthetic material
FGCPMPSVHALGLTA

SEQ ID NO: 125 - protein, 15 aa, Artificial Sequence
  Made in a lab from synthetic material
MPSVHALGLTASTCR

SEQ ID NO: 126 - protein, 15 aa, Artificial Sequence
  Made in a lab from synthetic material
HALGLTASTCRPFLP

SEQ ID NO: 127 - protein, 15 aa, Artificial Sequence
  Made in a lab from synthetic material
LTASTCRPFLPPGVI

SEQ ID NO: 128 - protein, 15 aa, Artificial Sequence
  Made in a lab from synthetic material
TCRPFLPPGVIPERA

SEQ ID NO: 129 - protein, 15 aa, Artificial Sequence
  Made in a lab from synthetic material
FLPPGVIPERAGGQG

SEQ ID NO: 130 - protein, 15 aa, Artificial Sequence
  Made in a lab from synthetic material
GVIPERAGGQGCAET

SEQ ID NO: 131 - protein, 15 aa, Artificial Sequence
  Made in a lab from synthetic material
ERAGGQGCAETLRAQ

SEQ ID NO: 132 - protein, 15 aa, Artificial Sequence
  Made in a lab from synthetic material
GQGCAETLRAQREKR

SEQ ID NO: 133 - protein, 16 aa, Artificial Sequence
  Made in a lab from synthetic material
AETLRAQREKRAGFWL

SEQ ID NO: 134 - protein, 15 aa, Artificial Sequence
  Made in a lab from synthetic material
PALLVAPRCALCCAA

SEQ ID NO: 135 - protein, 15 aa, Artificial Sequence
  Made in a lab from synthetic material
VAPRCALCCAADTGR

SEQ ID NO: 136 - protein, 15 aa, Artificial Sequence
  Made in a lab from synthetic material
CALCCAADTGRCGRW

SEQ ID NO: 137 - protein, 15 aa, Artificial Sequence
  Made in a lab from synthetic material
CAADTGRCGRWQPLC

SEQ ID NO: 138 - protein, 15 aa, Artificial Sequence
  Made in a lab from synthetic material
TGRCGRWQPLCGAWG

SEQ ID NO: 139 - protein, 15 aa, Artificial Sequence
  Made in a lab from synthetic material
GRWQPLCGAWGPRAG

SEQ ID NO: 140 - protein, 15 aa, Artificial Sequence
  Made in a lab from synthetic material
PLCGAWGPRAGGLCN

SEQ ID NO: 141 - protein, 15 aa, Artificial Sequence
  Made in a lab from synthetic material
AWGPRAGGLCNPGTR

SEQ ID NO: 142 - protein, 15 aa, Artificial Sequence
  Made in a lab from synthetic material
RAGGLCNPGTRRSTA

SEQ ID NO: 143 - protein, 17 aa, Artificial Sequence
  Made in a lab from synthetic material
LCNPGTRRSTALWLPNA

SEQ ID NO: 144 - protein, 15 aa, Artificial Sequence
  Made in a lab from synthetic material
MDATVEPSGRRPAGL

SEQ ID NO: 145 - protein, 15 aa, Artificial Sequence
  Made in a lab from synthetic material
VEPSGRRPAGLPAGT

SEQ ID NO: 146 - protein, 15 aa, Artificial Sequence
  Made in a lab from synthetic material
GRRPAGLPAGTLCSL

SEQ ID NO: 147 - protein, 15 aa, Artificial Sequence
  Made in a lab from synthetic material
AGLPAGTLCSLSSGA

SEQ ID NO: 148 - protein, 15 aa, Artificial Sequence
  Made in a lab from synthetic material
AGTLCSLSSGAPQLC

SEQ ID NO: 149 - protein, 15 aa, Artificial Sequence
  Made in a lab from synthetic material
CSLSSGAPQLCLPGV

SEQ ID NO: 150 - protein, 15 aa, Artificial Sequence
  Made in a lab from synthetic material
SGAPQLCLPGVWVSP

SEQ ID NO: 151 - protein, 15 aa, Artificial Sequence
  Made in a lab from synthetic material
QLCLPGVWVSPVPNL

SEQ ID NO: 152 - protein, 15 aa, Artificial Sequence
  Made in a lab from synthetic material
PGVWVSPVPNLCHHG

SEQ ID NO: 153 - protein, 18 aa, Artificial Sequence
  Made in a lab from synthetic material
VSPVPNLCHHGYLALCVR

SEQ ID NO: 154 - protein, 15 aa, Artificial Sequence
  Made in a lab from synthetic material
MLSCPESGGGTPQAG

SEQ ID NO: 155 - protein, 15 aa, Artificial Sequence
  Made in a lab from synthetic material
PESGGGTPQAGATNP

SEQ ID NO: 156 - protein, 15 aa, Artificial Sequence
  Made in a lab from synthetic material
GGTPQAGATNPIRQI

SEQ ID NO: 157 - protein, 15 aa, Artificial Sequence
  Made in a lab from synthetic material
QAGATNPIRQIMGAK

SEQ ID NO: 158 - protein, 15 aa, Artificial Sequence
  Made in a lab from synthetic material
TNPIRQIMGAKSCSV

SEQ ID NO: 159 - protein, 15 aa, Artificial Sequence
  Made in a lab from synthetic material
RQIMGAKSCSVPRGA

SEQ ID NO: 160 - protein, 15 aa, Artificial Sequence
  Made in a lab from synthetic material
GAKSCSVPRGAYCRE

SEQ ID NO: 161 - protein, 15 aa, Artificial Sequence
  Made in a lab from synthetic material
CSVPRGAYCRERFVF

SEQ ID NO: 162 - protein, 15 aa, Artificial Sequence
  Made in a lab from synthetic material
MPFSSGHLLRPDISF

SEQ ID NO: 163 - protein, 15 aa, Artificial Sequence
  Made in a lab from synthetic material
SGHLLRPDISFTPGE

SEQ ID NO: 164 - protein, 16 aa, Artificial Sequence
  Made in a lab from synthetic material
LRPDISFTPGEMAKSV

SEQ ID NO: 165 - protein, 15 aa, Artificial Sequence
  Made in a lab from synthetic material
MQSANMSDSSGHIAG

SEQ ID NO: 166 - protein, 18 aa, Artificial Sequence
  Made in a lab from synthetic material
NMSDSSGHIAGFEQQTNR

SEQ ID NO: 167 - protein, 15 aa, Artificial Sequence
  Made in a lab from synthetic material
MVFFGPVSARWCLLV

SEQ ID NO: 168 - protein, 15 aa, Artificial Sequence
  Made in a lab from synthetic material
GPVSARWCLLVSGVP

SEQ ID NO: 169 - protein, 15 aa, Artificial Sequence
  Made in a lab from synthetic material
ARWCLLVSGVPGTMS

SEQ ID NO: 170 - protein, 17 aa, Artificial Sequence
  Made in a lab from synthetic material
LLVSGVPGTMSAASLRT

SEQ ID NO: 171 - protein, 16 aa, Artificial Sequence
  Made in a lab from synthetic material
MSGQNILTLWGLLYWV

SEQ ID NO: 172 - protein, 15 aa, Artificial Sequence
  Made in a lab from synthetic material
MTSTGPGGPLCCVCV

SEQ ID NO: 173 - protein, 15 aa, Artificial Sequence
  Made in a lab from synthetic material
GPGGPLCCVCVLWTR

SEQ ID NO: 174 - protein, 15 aa, Artificial Sequence
  Made in a lab from synthetic material
PLCCVCVLWTRHPGC

SEQ ID NO: 175 - protein, 17 aa, Artificial Sequence
  Made in a lab from synthetic material
VCVLWTRHPGCTLLRQM

SEQ ID NO: 176 - protein, 15 aa, Artificial Sequence
  Made in a lab from synthetic material
MMPSPRVSWWRLLPI

SEQ ID NO: 177 - protein, 15 aa, Artificial Sequence
  Made in a lab from synthetic material
MQWSGEIAKAKSTSP

SEQ ID NO: 178 - protein, 15 aa, Artificial Sequence
  Made in a lab from synthetic material
GEIAKAKSTSPLGDR

SEQ ID NO: 179 - protein, 15 aa, Artificial Sequence
  Made in a lab from synthetic material
KAKSTSPLGDRSPPS

SEQ ID NO: 180 - protein, 15 aa, Artificial Sequence
  Made in a lab from synthetic material
TSPLGDRSPPSLTSS

SEQ ID NO: 181 - protein, 15 aa, Artificial Sequence
  Made in a lab from synthetic material
GDRSPPSLTSSHTWA

SEQ ID NO: 182 - protein, 15 aa, Artificial Sequence
  Made in a lab from synthetic material
PPSLTSSHTWASSLS

SEQ ID NO: 183 - protein, 15 aa, Artificial Sequence
  Made in a lab from synthetic material
TSSHTWASSLSICRI

SEQ ID NO: 184 - protein, 16 aa, Artificial Sequence
  Made in a lab from synthetic material
TWASSLSICRIQMPVH

SEQ ID NO: 185 - protein, 19 aa, Artificial Sequence
  Made in a lab from synthetic material
MRAAAACLTSSCTSCVTVS

SEQ ID NO: 186 - protein, 13 aa, Artificial Sequence
  Made in a lab from synthetic material
MGCFYVLLMTFCW

SEQ ID NO: 187 - protein, 15 aa, Artificial Sequence
  Made in a lab from synthetic material
MPRPQLRRASPSRVS

SEQ ID NO: 188 - protein, 15 aa, Artificial Sequence
  Made in a lab from synthetic material
QLRRASPSRVSSKLG

SEQ ID NO: 189 - protein, 15 aa, Artificial Sequence
  Made in a lab from synthetic material
ASPSRVSSKLGRPCG

SEQ ID NO: 190 - protein, 15 aa, Artificial Sequence
  Made in a lab from synthetic material
RVSSKLGRPCGTSSC

SEQ ID NO: 191 - protein, 15 aa, Artificial Sequence
  Made in a lab from synthetic material
KLGRPCGTSSCRSCG

SEQ ID NO: 192 - protein, 15 aa, Artificial Sequence
  Made in a lab from synthetic material
MSPGTSEDSPKTAVP

SEQ ID NO: 193 - protein, 15 aa, Artificial Sequence
  Made in a lab from synthetic material
TSEDSPKTAVPEAPR

SEQ ID NO: 194 - protein, 17 aa, Artificial Sequence
  Made in a lab from synthetic material
SPKTAVPEAPRGDNDHP

SEQ ID NO: 195 - protein, 77 aa, Artificial Sequence
  Made in a lab from synthetic material
RCRALPAAEPCAPCCAATTARCCRWPRSCGAWGPRAGGWCSAGTRRLSARWWPSAWCACPGTHGRPPPPPPSARCPA

SEQ ID NO: 196 - protein, 190 aa, Artificial Sequence
  Made in a lab from synthetic material
DAARSPLPSRALPAAQPLPRGAAAGHVRAAPGAPGLAAGAARGPGGFPRAGGPVPGVRALGRTAAPRRPLLPPGVLPEGAGGPSAAEAVRARREERAGLRLRAAGRGPRGPPRGLHHQRAQLPAQHGDRRTAGERGVGAAAAPRGRRRAGSPAGTLRALCAGGSQLRLPGVRAAAVPARRCHSGPAPATR

SEQ ID NO: 197 - protein, 31 aa, Artificial Sequence
  Made in a lab from synthetic material
MSRRPRFKRTGSFSTGRVSGASCKALESDST

SEQ ID NO: 198 - protein, 21 aa, Artificial Sequence
  Made in a lab from synthetic material
MPWSRRPPMGTSARPSRATSL

SEQ ID NO: 199 - protein, 10 aa, Artificial Sequence
  Made in a lab from synthetic material
MPSSSSRAPP

SEQ ID NO: 200 - protein, 74 aa, Artificial Sequence
  Made in a lab from synthetic material
MRPAVASSTSSYASCATTPCASGASPTSSARGSRRAPSSPRCSAACATATWRTSCLRGFGGTGCSCVWWMISCW

SEQ ID NO: 201 - protein, 31 aa, Artificial Sequence
  Made in a lab from synthetic material
MPGPPSEPVSPSTAASRLGGTCVANSLGSCG

SEQ ID NO: 202 - protein, 23 aa, Artificial Sequence
  Made in a lab from synthetic material
MCAAAPISSASLEEPHIFPARHL

SEQ ID NO: 203 - protein, 10 aa, Artificial Sequence
  Made in a lab from synthetic material
RCPFGQPGSA

SEQ ID NO: 204 - protein, 15 aa, Artificial Sequence
  Made in a lab from synthetic material
DVLSGSQAQHEEQKE

SEQ ID NO: 205 - protein, 27 aa, Artificial Sequence
  Made in a lab from synthetic material
MTLWTAPGPCTPARLGAQTCLTVKATW

SEQ ID NO: 206 - protein, 33 aa, Artificial Sequence
  Made in a lab from synthetic material
MCLLYQRFQGHGECVQVWLCPEPAHGRHPDQPK

SEQ ID NO: 207 - protein, 67 aa, Artificial Sequence
  Made in a lab from synthetic material
MCASVAMPRASTWKAPRSTKVRNGTTRNTPRNFLPTPLGIFSLRHWGRKGSIYVCPATRTRKSFTSC

SEQ ID NO: 208 - protein, 20 aa, Artificial Sequence
  Made in a lab from synthetic material
MELQETHQGISYRRLWGYSV

SEQ ID NO: 209 - protein, 38 aa, Artificial Sequence
  Made in a lab from synthetic material
MTSQEIHCISWTTTTHICCSWTMAVMDIPLSKQSSGIS

SEQ ID NO: 210 - protein, 17 aa, Artificial Sequence
  Made in a lab from synthetic material
MVARSPLCVLPKEVEKR

SEQ ID NO: 211 - protein, 15 aa, Artificial Sequence
  Made in a lab from synthetic material
MAQRNSRMFSPINSY

SEQ ID NO: 212 - protein, 24 aa, Artificial Sequence
  Made in a lab from synthetic material
MPSPTLYTKPSAPVSKTRITGMGS

SEQ ID NO: 213 - protein, 24 aa, Artificial Sequence
  Made in a lab from synthetic material
MMRFSPMTADGSLLTFKKSCLRLS

SEQ ID NO: 214 - protein, 58 aa, Artificial Sequence
  Made in a lab from synthetic material
MMSSLNSSPTTSARLCTGICRSPRIPIMMPSSRLSGNWLRTSEEASGRKTEMAGTRWT

SEQ ID NO: 215 - protein, 174 aa, Artificial Sequence
  Made in a lab from synthetic material
MLLGSPRSWLMSTRPGLLSCSLSVTAAMKTWQNSCWSIPVKLGVEATVWSWRWRPQTSISSPSLGSRIFFLSNGMERFPETPRTGRLSCVCLLYPWWAVALYHLGRNLSTSTRSCFGTMWRSSPPPSWSSPGMWSSTSPSSCCLPTCCSWISIRCHTPPSWSCTRWSLSSSVMK

SEQ ID NO: 216 - protein, 31 aa, Artificial Sequence
  Made in a lab from synthetic material
MVWRDFPRHQELEDYPVSVYYTLGGLWLCII

SEQ ID NO: 217 - protein, 159 aa, Artificial Sequence
  Made in a lab from synthetic material
MCSSSCSSLRCGWWPLAWPGKGSLGRMSSAGGGYSVRSSTSPTWPCSARCPVTWMVPRMTLPTAPSLGMSPSHCVWSWMSTTCPGSPSGSPSPWCASTCYPPTSCWSTCWSPCLATRWAPSRRTMTRSGSSRGTSWCRSTAAASISPSPSSSSLTSTWW

SEQ ID NO: 218 - protein, 12 aa, Artificial Sequence
  Made in a lab from synthetic material
MKTMRLWHGRVS

SEQ ID NO: 219 - protein, 28 aa, Artificial Sequence
  Made in a lab from synthetic material
MGGCHEGKLPCQDQHKSQRHLRGNEASI

SEQ ID NO: 220 - protein, 10 aa, Artificial Sequence
  Made in a lab from synthetic material
WRPFGQPGSA

SEQ ID NO: 221 - protein, 15 aa, Artificial Sequence
  Made in a lab from synthetic material
GVLSGSRAQHEEQKE

SEQ ID NO: 222 - protein, 15 aa, Artificial Sequence
  Made in a lab from synthetic material
MTLWTAPGPCTPARL

SEQ ID NO: 223 - protein, 15 aa, Artificial Sequence
  Made in a lab from synthetic material
TAPGPCTPARLGAQT

SEQ ID NO: 224 - protein, 15 aa, Artificial Sequence
  Made in a lab from synthetic material
PCTPARLGAQTCLTV

SEQ ID NO: 225 - protein, 15 aa, Artificial Sequence
  Made in a lab from synthetic material
ARLGAQTCLTVKATW

SEQ ID NO: 226 - protein, 15 aa, Artificial Sequence
  Made in a lab from synthetic material
MCLLYQRFQGHGECV

SEQ ID NO: 227 - protein, 15 aa, Artificial Sequence
  Made in a lab from synthetic material
YQRFQGHGECVQVWL

SEQ ID NO: 228 - protein, 15 aa, Artificial Sequence
  Made in a lab from synthetic material
QGHGECVQVWLCPEP

SEQ ID NO: 229 - protein, 15 aa, Artificial Sequence
  Made in a lab from synthetic material
ECVQVWLCPEPAHGR

SEQ ID NO: 230 - protein, 15 aa, Artificial Sequence
  Made in a lab from synthetic material
VWLCPEPAHGRHPDQ

SEQ ID NO: 231 - protein, 13 aa, Artificial Sequence
  Made in a lab from synthetic material
PEPAHGRHPDQPK

SEQ ID NO: 232 - protein, 15 aa, Artificial Sequence
  Made in a lab from synthetic material
MCASVAMPRASTWKA

SEQ ID NO: 233 - protein, 15 aa, Artificial Sequence
  Made in a lab from synthetic material
VAMPRASTWKAPRST

SEQ ID NO: 234 - protein, 15 aa, Artificial Sequence
  Made in a lab from synthetic material
RASTWKAPRSTKVRN

SEQ ID NO: 235 - protein, 15 aa, Artificial Sequence
  Made in a lab from synthetic material
WKAPRSTKVRNGTTR

SEQ ID NO: 236 - protein, 15 aa, Artificial Sequence
  Made in a lab from synthetic material
RSTKVRNGTTRNTPR

SEQ ID NO: 237 - protein, 15 aa, Artificial Sequence
  Made in a lab from synthetic material
VRNGTTRNTPRNFLP

SEQ ID NO: 238 - protein, 15 aa, Artificial Sequence
  Made in a lab from synthetic material
TTRNTPRNFLPTPLG

SEQ ID NO: 239 - protein, 15 aa, Artificial Sequence
  Made in a lab from synthetic material
TPRNFLPTPLGIFSL

SEQ ID NO: 240 - protein, 15 aa, Artificial Sequence
  Made in a lab from synthetic material
FLPTPLGIFSLRHWG

SEQ ID NO: 241 - protein, 15 aa, Artificial Sequence
  Made in a lab from synthetic material
PLGIFSLRHWGRKGS

SEQ ID NO: 242 - protein, 15 aa, Artificial Sequence
  Made in a lab from synthetic material
FSLRHWGRKGSIYVC

SEQ ID NO: 243 - protein, 15 aa, Artificial Sequence
  Made in a lab from synthetic material
HWGRKGSIYVCPATR

SEQ ID NO: 244 - protein, 15 aa, Artificial Sequence
  Made in a lab from synthetic material
KGSIYVCPATRTRKS

SEQ ID NO: 245 - protein, 15 aa, Artificial Sequence
  Made in a lab from synthetic material
YVCPATRTRKSFTSC

SEQ ID NO: 246 - protein, 15 aa, Artificial Sequence
  Made in a lab from synthetic material
MELQETHQGISYRRL

SEQ ID NO: 247 - protein, 16 aa, Artificial Sequence
  Made in a lab from synthetic material
ETHQGISYRRLWGYSV

SEQ ID NO: 248 - protein, 24 aa, Artificial Sequence
  Made in a lab from synthetic material
ELHPSSWPGQQALALASCFCFFSG

SEQ ID NO: 249 - protein, 14 aa, Artificial Sequence
  Made in a lab from synthetic material
HESCTPPPGQGSKP

SEQ ID NO: 250 - protein, 14 aa, Artificial Sequence
  Made in a lab from synthetic material
METEVPLTPFPLTP

SEQ ID NO: 251 - protein, 17 aa, Artificial Sequence
  Made in a lab from synthetic material
MATRIWPTHPAGHGAAL

SEQ ID NO: 252 - protein, 19 aa, Artificial Sequence
  Made in a lab from synthetic material
MSPINMNRFIFEAQTLTGL

SEQ ID NO: 253 - protein, 34 aa, Artificial Sequence
  Made in a lab from synthetic material
MARTFLEFGVKSTTLYIVRVFTISLYPPGPLRTP

SEQ ID NO: 254 - protein, 24 aa, Artificial Sequence
  Made in a lab from synthetic material
MEFTSRKRNLGSKGVSWSMKSSIT

SEQ ID NO: 255 - protein, 14 aa, Artificial Sequence
  Made in a lab from synthetic material
MFTTDSFLPMLLAT

SEQ ID NO: 256 - protein, 30 aa, Artificial Sequence
  Made in a lab from synthetic material
MRRSTSRIPSCYLAAALAVLWRGLLSWLAL

SEQ ID NO: 257 - protein, 13 aa, Artificial Sequence
  Made in a lab from synthetic material
ESCTPPPGQGSKP

SEQ ID NO: 258 - protein, 15 aa, Artificial Sequence
  Made in a lab from synthetic material
ELHPSSWPGQQALAL

SEQ ID NO: 259 - protein, 15 aa, Artificial Sequence
  Made in a lab from synthetic material
SSWPGQQALALASCF

SEQ ID NO: 260 - protein, 16 aa, Artificial Sequence
  Made in a lab from synthetic material
GQQALALASCFCFFSG

SEQ ID NO: 261 - protein, 14 aa, Artificial Sequence
  Made in a lab from synthetic material
METEVPLTPFPLTP

SEQ ID NO: 262 - protein, 17 aa, Artificial Sequence
  Made in a lab from synthetic material
MATRIWPTHPAGHGAAL

SEQ ID NO: 263 - protein, 15 aa, Artificial Sequence
  Made in a lab from synthetic material
MSPINMNRFIFEAQT

SEQ ID NO: 264 - protein, 15 aa, Artificial Sequence
  Made in a lab from synthetic material
NMNRFIFEAQTLTGL

SEQ ID NO: 265 - protein, 15 aa, Artificial Sequence
  Made in a lab from synthetic material
MARTFLEFGVKSTTL

SEQ ID NO: 266 - protein, 15 aa, Artificial Sequence
  Made in a lab from synthetic material
FLEFGVKSTTLYIVR

SEQ ID NO: 267 - protein, 15 aa, Artificial Sequence
  Made in a lab from synthetic material
GVKSTTLYIVRVFTI

SEQ ID NO: 268 - protein, 15 aa, Artificial Sequence
  Made in a lab from synthetic material
TTLYIVRVFTISLYP

SEQ ID NO: 269 - protein, 15 aa, Artificial Sequence
  Made in a lab from synthetic material
IVRVFTISLYPPGPL

SEQ ID NO: 270 - protein, 14 aa, Artificial Sequence
  Made in a lab from synthetic material
FTISLYPPGPLRTP

SEQ ID NO: 271 - protein, 15 aa, Artificial Sequence
  Made in a lab from synthetic material
MEFTSRKRNLGSKGV

SEQ ID NO: 272 - protein, 15 aa, Artificial Sequence
  Made in a lab from synthetic material
SRKRNLGSKGVSWSM

SEQ ID NO: 273 - protein, 16 aa, Artificial Sequence
  Made in a lab from synthetic material
NLGSKGVSWSMKSSIT

SEQ ID NO: 274 - protein, 14 aa, Artificial Sequence
  Made in a lab from synthetic material
MFTTDSFLPMLLAT

SEQ ID NO: 275 - protein, 15 aa, Artificial Sequence
  Made in a lab from synthetic material
MRRSTSRIPSCYLAA

SEQ ID NO: 276 - protein, 15 aa, Artificial Sequence
  Made in a lab from synthetic material
TSRIPSCYLAAALAV

SEQ ID NO: 277 - protein, 15 aa, Artificial Sequence
  Made in a lab from synthetic material
PSCYLAAALAVLWRG

SEQ ID NO: 278 - protein, 15 aa, Artificial Sequence
  Made in a lab from synthetic material
LAAALAVLWRGLLSW

SEQ ID NO: 279 - protein, 14 aa, Artificial Sequence
  Made in a lab from synthetic material
LAVLWRGLLSWLAL

SEQ ID NO: 280 - protein, 12 aa, Artificial Sequence
  Made in a lab from synthetic material
ELHPSSWPGQQA

SEQ ID NO: 281 - protein, 50 aa, Artificial Sequence
  Made in a lab from synthetic material
HESCTPPPGQGSKLSLCFLFLLFLLARPKCTSQGVEVCDFGVSAWTPKSH

SEQ ID NO: 282 - protein, 14 aa, Artificial Sequence [sequence omitted]

SEQ ID NO: 283 - protein, 17 aa, Artificial Sequence
  Made in a lab from synthetic material
MATKDLANSPSWHGAAL

SEQ ID NO: 284 - protein, 19 aa, Artificial Sequence
  Made in a lab from synthetic material
MSPINMNRFIFEAQTLTGL

SEQ ID NO: 285 - protein, 34 aa, Artificial Sequence; identical to SEQ ID NO: 253
  Made in a lab from synthetic material

SEQ ID NO: 286 - protein, 24 aa, Artificial Sequence
  Made in a lab from synthetic material
MEFTSRKRNLGSKGVSWSMKSSIT

SEQ ID NO: 287 - protein, 14 aa, Artificial Sequence
  Made in a lab from synthetic material
MFTTDSFLPMLLAT

SEQ ID NO: 288 - protein, 30 aa, Artificial Sequence
  Made in a lab from synthetic material
MRRSTSRIPSCYLDAAPAVLWRGLLSWLAL

SEQ ID NO: 289 - protein, 11 aa, Artificial Sequence
  Made in a lab from synthetic material
MQPQLSSGEVC

SEQ ID NO: 290 - DNA, 21 bp, Artificial Sequence
  Made in a lab from synthetic material
tacggtaaactgcccacttgg

SEQ ID NO: 291 - DNA, 22 bp, Artificial Sequence
  Made in a lab from synthetic material
aaatgtcgtaacaactccgccc

SEQ ID NO: 292 - DNA, 29 bp, Artificial Sequence
  Made in a lab from synthetic material
cttgcagccagcaaactcctggatattgg

SEQ ID NO: 293 - DNA, 28 bp, Artificial Sequence
  Made in a lab from synthetic material
gcacagggcttgctgcacttctcacacc

SEQ ID NO: 294 - protein, 459 aa, Derived From Human Sequence
MAPLCPSPWLPLLIPAPAPGLTVQLLLSLLLLMPVHPQRLPRMQEDSPLGGGSSGEDDPLGEEDLPSEEDSPREEDPPGEEDLPGEEDLPGEEDLPEVKPKSEEEGSLKLEDLPTVEAPGDPQEPQNNAHRDKEGDDQSHWRYGGDPPWPRVSPACAGRFQSPVDIRPQLAAFCPALRPLELLGFQLPPLPELRLRNNGHSVQLTLPPGLEMALGPGREYRALQLHLHWGAAGRPGSEHTVEGHRFPAEIHVVHLSTAFARVDEALGRPGGLAVLAAFLEEGPEENSAYEQLLSRLEEIAEEGSETQVPGLDISALLPSDFSRYFQYEGSLTTPPCAQGVIWTVFNQTVMLSAKQLHTLSDTLWGPGDSRLQLNFRATQPLNGRVIEASFPAGVDSSPRAAEPVQLNSCLAAGDILALVFGLLFAVTSVAFLVQMRRQHRRGTKGGVSYRPAEVAETGA

SEQ ID NO: 295 - DNA, 1552 bp, Derived From Human Sequence
gcccgtacacaccgtgtgctgggacaccccacagtcagccgcatggctcccctgtgccccagcccctggctccctctgttgatcccggcccctgctccaggcctcactgtgcaactgctgctgtcactgctgcttctgatgcctgtccatccccagaggttgccccggatgcaggaggattcccccttgggaggaggctcttctggggaagatgacccactgggcgaggaggatctgcccagtgaagaggattcacccagagaggaggatccacccggagaggaggatctacctggagaggaggatctacctggagaggaggatctacctgaagttaagcctaaatcagaagaagagggctccctgaagttagaggatctacctactgttgaggctcctggagatcctcaagaaccccagaataatgcccacagggacaaagaaggggatgaccagagtcattggcgctatggaggcgacccgccctggccccgggtgtccccagcctgcgcgggccgcttccagtccccggtggatatccgcccccagctcgccgccttctgcccggccctgcgccccctggaactcctgggcttccagctcccgccgctcccagaactgcgcctgcgcaacaatggccacagtgtgcaactgaccctgcctcctgggctagagatggctctgggtcccgggcgggagtaccgggctctgcagctgcatctgcactggggggctgcaggtcgtccgggctcggagcacactgtggaaggccaccgtttccctgccgagatccacgtggttcacctcagcaccgcctttgccagagttgacgaggccttggggcgcccgggaggcctggccgtgttggccgcctttctggaggagggcccggaagaaaacagtgcctatgagcagttgctgtctcgcttggaagaaatcgctgaggaaggctcagagactcaggtcccaggactggacatatctgcactcctgccctctgacttcagccgctacttccaatatgaggggtctctgactacaccgccctgtgcccagggtgtcatctggactgtgtttaaccagacagtgatgctgagtgctaagcagctccacaccctctctgacaccctgtggggacctggtgactctcggctacagctgaacttccgagcgacgcagcctttgaatgggcgagtgattgaggcctccttccctgctggagtggacagcagtcctcgggctgctgagccagtccagctgaattcctgcctggctgctggtgacatcctagccctggtttttggcctcctttttgctgtcaccagcgtcgcgttccttgtgcagatgagaaggcagcacagaaggggaaccaaagggggtgtgagctaccgcccagcagaggtagccgagactggagcctagaggctggatcttggagaatgtgagaagccagccagaggcatctgagggggagccggtaactgtcctgtcctgctcattatgccacttccttttaactgccaagaaattttttaaaataaatatttataat

SEQ ID NO: 296 - protein, 12 aa, Derived From Human Sequence
WLPCAPAPGSLC

SEQ ID NO: 297 - protein, 56 aa, Derived From Human Sequence
GSPVPQPLAPSVDPGPCSRPHCATAAVTAASDACPSPEVAPDAGGFPLGRRLFWGR

SEQ ID NO: 298 - protein, 51 aa, Derived From Human Sequence
MTHWARRICPVKRIHPERRIHPERRIYLERRIYLERRIYLKLSLNQKKRAP

SEQ ID NO: 299 - protein, 76 aa, Derived From Human Sequence
MPTGTKKGMTRVIGAMEATRPGPGCPQPARAASSPRWISAPSSPPSARPCAPWNSWASSSRRSQNCACATMATVCN

SEQ ID NO: 300 - protein, 42 aa, Derived From Human Sequence
MSSCCLAWKKSLRKAQRLRSQDWTYLHSCPLTSAATSNMRGL

SEQ ID NO: 301 - protein, 702 aa, Derived From Human Sequence
MESPSAPPHRWCIPWQRLLLTASLLTFWNPPTTAKLTIESTPFNVAEGKEVLLLVHNLPQHLFGYSWYKGERVDGNRQIIGYVIGTQQATPGPAYSGREIIYPNASLLIQNIIQNDTGFYTLHVIKSDLVNEEATGQFRVYPELPKPSISSNNSKPVEDKDAVAFTCEPETQDATYLWWVNNQSLPVSPRLQLSNGNRTLTLFNVTRNDTASYKCETQNPVSARRSDSVILNVLYGPDAPTISPLNTSYRSGENLNLSCHAASNPPAQYSWFVNGTFQQSTQELFIPNITVNNSGSYTCQAHNSDTGLNRTTVTTITVYAEPPKPFITSNNSNPVEDEDAVALTCEPEIQNTTYLWWVNNQSLPVSPRLQLSNDNRTLTLLSVTRNDVGPYECGIQNELSVDHSDPVILNVLYGPDDPTISPSYTYYRPGVNLSLSCHAASNPPAQYSWLIDGNIQQHTQELFISNITEKNSGLYTCQANNSASGHSRTTVKTITVSAELPKPSISSNNSKPVEDKDAVAFTCEPEAQNTTYLWWVNGQSLPVSPRLQLSNGNRTLTLFNVTRNDARAYVCGIQNSVSANRSDPVTLDVLYGPDTPIISPPDSSYLSGANLNLSCHSASNPSPQYSWRINGIPQQHTQVLFIAKITPNNNGTYACFVSNLATGRNNSIVKSITVSASGTSPGLSAGATVGIMIGVLVGVALI

SEQ ID NO: 302 - DNA, 3036 bp, Derived From Human Sequence
cgaccagcagaccagacagtcacagcagccttgacaaaacgttcctggaactcaagcacttctccacagaggaggacagagcagacagcagagaccatggagtctccctcggcccctccccacagatggtgcatcccctggcagaggctcctgctcacagcctcacttctaaccttctggaacccgcccaccactgccaagctcactattgaatccacgccgttcaatgtcgcagaggggaaggaggtgcttctacttgtccacaatctgccccagcatctttttggctacagctggtacaaaggtgaaagagtggatggcaaccgtcaaattataggatatgtaataggaactcaacaagctaccccagggcccgcatacagtggtcgagagataatataccccaatgcatccctgctgatccagaacatcatccagaatgacacaggattctacaccctacacgtcataaagtcagatcttgtgaatgaagaagcaactggccagttccgggtatacccggagctgcccaagccctccatctccagcaacaactccaaacccgtggaggacaaggatgctgtggccttcacctgtgaacctgagactcaggacgcaacctacctgtggtgggtaaacaatcagagcctcccggtcagtcccaggctgcagctgtccaatggcaacaggaccctcactctattcaatgtcacaagaaatgacacagcaagctacaaatgtgaaacccagaacccagtgagtgccaggcgcagtgattcagtcatcctgaatgtcctctatggcccggatgcccccaccatttcccctctaaacacatcttacagatcaggggaaaatctgaacctctcctgccatgcagcctctaacccacctgcacagtactcttggtttgtcaatgggactttccagcaatccacccaagagctctttatccccaacatcactgtgaataatagtggatcctatacgtgccaagcccataactcagacactggcctcaataggaccacagtcacgacgatcacagtctatgcagagccacccaaacccttcatcaccagcaacaactccaaccccgtggaggatgaggatgctgtagccttaacctgtgaacctgagattcagaacacaacctacctgtggtgggtaaataatcagagcctcccggtcagtcccaggctgcagctgtccaatgacaacaggaccctcactctactcagtgtcacaaggaatgatgtaggaccctatgagtgtggaatccagaacgaattaagtgttgaccacagcgacccagtcatcctgaatgtcctctatggcccagacgaccccaccatttccccctcatacacctattaccgtccaggggtgaacctcagcctctcctgccatgcagcctctaacccacctgcacagtattcttggctgattgatgggaacatccagcaacacacacaagagctctttatctccaacatcactgagaagaacagcggactctatacctgccaggccaataactcagccagtggccacagcaggactacagtcaagacaatcacagtctctgcggagctgcccaagccctccatctccagcaacaactccaaacccgtggaggacaaggatgctgtggccttcacctgtgaacctgaggctcagaacacaacctacctgtggtgggtaaatggtcagagcctcccagtcagtcccaggctgcagctgtccaatggcaacaggaccctcactctattcaatgtcacaagaaatgacgcaagagcctatgtatgtggaatccagaactcagtgagtgcaaaccgcagtgacccagtcaccctggatgtcctctatgggccggacacccccatcatttcccccccagactcgtcttacctttcgggagcgaacctcaacctctcctgccactcggcctctaacccatccccgcagtattcttggcgtatcaatgggataccgcagcaacacacacaagttctctttatcgccaaaatcacgccaaataataacgggacctatgcctgttttgtctctaacttggctactggccgcaataattccatagtcaagagcatcacagtctctgcatctggaacttctcctggtctctcagctggggccactgtcggcatcatgattggagtgctggttggggttgctctgatatagcagccctggtgtagtttcttcatttcaggaagactgacagttgttttgcttcttccttaaagcatttgcaacagctacagtctaaaattgcttctttaccaaggatatttacagaaaagactctgaccagagatcgagaccatcctagccaacatcgtgaaaccccatctctactaaaaatacaaaaatgagctgggcttggtggcgcgcacctgtagtcccagttactcgggaggctgaggcaggagaatcgcttgaacccgggaggtggagattgcagtgagcccagatcgcaccactgcactccagtctggcaacagagcaagactccatctcaaaaagaaaagaaaagaagactctgacctgtactcttgaatacaagtttctgataccactgcactgtctgagaatttccaaaactttaatgaactaactgacagcttcatgaaactgtccaccaagatcaagcagagaaaataattaatttcatgggactaaatgaactaatgaggataatattttcataattttttatttgaaattttgctgattctttaaatgtcttgtttcccagatttcaggaaactttttttcttttaagctatccacagcttacagcaatttgataaaatatacttttgtgaacaaaaattgagacatttacattttctccctatgtggtcgctccagacttgggaaactattcatgaatatttatattgtatggtaatatagttattgcacaagttcaataaaaatctgctctttgtatgacagaatacatttgaaaacattggttatattaccaagactttgactagaatgtcgtat

SEQ ID NO: 303 - protein, 37 aa, Derived From Human Sequence
LLHRGGQSRQQRPWSLPRPLPTDGASPGRGSCSQPHF

SEQ ID NO: 304 - protein, 50 aa, Derived From Human Sequence
FSTEEDRADSRDHGVSLGPSPQMVHPLAEAPAHSLTSNLLEPAHHCQAHY

SEQ ID NO: 305 - protein, 28 aa, Derived From Human Sequence
MVHPLAEAPAHSLTSNLLEPAHHCQAHY

SEQ ID NO: 306 - protein, 36 aa, Derived From Human Sequence
MSQRGRRCFYLSTICPSIFLATAGTKVKEWMATVKL

SEQ ID NO: 307 - protein, 10 aa, Derived From Human Sequence
MTQDSTPYTS

SEQ ID NO: 308 - protein, 49 aa, Derived From Human Sequence
MKKQLASSGYTRSCPSPPSPATTPNPWRTRMLWPSPVNLRLRTQPTCGG

SEQ ID NO: 309 - protein, 26 aa, Derived From Human Sequence
MATGPSLYSMSQEMTQQATNVKPRTQ

SEQ ID NO: 310 - protein, 13 aa, Derived From Human Sequence
MSSMARMPPPFPL

SEQ ID NO: 311 - protein, 31 aa, Derived From Human Sequence
MQPLTHLHSTLGLSMGLSSNPPKSSLSPTSL

SEQ ID NO: 312 - protein, 22 aa, Derived From Human Sequence
MQSHPNPSSPATTPTPWRMRML

SEQ ID NO: 313 - protein, 15 aa, Derived From Human Sequence
MTTGPSLYSVSQGMM

SEQ ID NO: 314 - protein, 21 aa, Derived From Human Sequence
MSSMAQTTPPFPPHTPITVQG

SEQ ID NO: 315 - protein, 12 aa, Derived From Human Sequence
MQPLTHLHSILG

SEQ ID NO: 316 - protein, 84 aa, Derived From Human Sequence
MGTSSNTHKSSLSPTSLRRTADSIPARPITQPVATAGLQSRQSQSLRSCPSPPSPATTPNPWRTRMLWPSPVNLRLRTQPTCGG

SEQ ID NO: 317 - protein, 40 aa, Derived From Human Sequence
MVRASQSVPGCSCPMATGPSLYSMSQEMTQEPMYVESRTQ

SEQ ID NO: 318 - protein, 12 aa, Derived From Human Sequence
MWNPELSECKPQ

SEQ ID NO: 319 - protein, 80 aa, Derived From Human Sequence
MSSMGRTPPSFPPQTRLTFRERTSTSPATRPLTHPRSILGVSMGYRSNTHKFSLSPKSRQIITGPMPVLSLTWLLAAIIP

SEQ ID NO: 320 - protein, 415 aa, Derived From Human Sequence
MWLPCAPAPGSLCSRPLLQASLCNCCCHCCFCLSIPRGCPGCRRIPPWEEALLGKMTHWARRICPVKRIHPERRIHPERRIYLERRIYLERRIYLKLSLNQKKRAPRIYLLLRLLEILKNPRIMPTGTKKGMTRVIGAMEATRPGPGCPQPARAASSPRWISAPSSPPSARPCAPWNSWASSSRRSQNCACATMATVCNRWLWVPGGSTGLCSCICTGGLQVVRARSTLWKATVSLPRSTWFTSAPPLPELTRPWGAREAWPCWPPFWRRARKKTVPMSSCCLAWKKSLRKAQRLRSQDWTYLHSCPLTSAATSNMRGLLHRPVPRVSSGLCLTRQVLSSSTPSLTPCGDLVTLGYSLRPPSLLEWTAVLGLLSQSSIPAWLLVTSPWFLASFLLSPASRSLCREGSTEGEPKGV

SEQ ID NO: 321 - DNA, 1248 bp, Derived From Human Sequence
atgtggctcccctgtgccccagcccctggctccctctgttcccggcccctgctccaggcctcactgtgcaactgctgctgtcactgctgcttctgcctgtccatccccagaggttgccccggatgcaggaggattcccccttgggaggaggctcttctggggaagatgacccactgggcgaggaggatctgcccagtgaagaggattcacccagagaggaggatccacccggagaggaggatctacctggagaggaggatctacctggagaggaggatctacctgaagttaagcctaaatcagaagaagagggctcccaggatctacctactgttgaggctcctggagatcctcaagaaccccagaataatgcccacagggacaaagaaggggatgaccagagtcattggcgctatggaggcgacccgccctggccccgggtgtccccagcctgcgcgggccgcttccagtccccggtggatatccgcccccagctcgccgccttctgcccggccctgcgccccctggaactcctgggcttccagctcccgccgctcccagaactgcgcctgcgcaacaatggccacagtgtgcaacagatggctctgggtcccgggcgggagtaccgggctctgcagctgcatctgcactggggggctgcaggtcgtccgggctcggagcacactgtggaaggccaccgtttccctgccgagatccacgtggttcacctcagcaccgcctttgccagagttgacgaggccttggggcgcccgggaggcctggccgtgttggccgcctttctggaggagggcccggaagaaaacagtgcctatgagcagttgctgtctcgcttggaagaaatcgctgaggaaggctcagagactcaggtcccaggactggacatatctgcactcctgccctctgacttcagccgctacttccaatatgaggggtctcctacaccgccctgtgcccagggtgtcatctggactgtgtttaaccagacaggtgctaagcagctccacaccctctctgacaccctgtggggacctggtgactctcggctacagcttgaggcctccttccctgctggagtggacagcagtcctcgggctgctgagccagtccagcattcctgcctggctgctggtgacatccccctggtttttggcctcctttttgctgtcaccagcgtcgcgttccttgtgcagagaaggcagcacagaaggggaaccaaagggggtgtga

SEQ ID NO: 322 - protein, 404 aa, Derived From Human Sequence
MGSPVPQPLAPSVDPGPCSRPHCATAAVTAASDACPSPEVAPDAGGFPLGRRLFWGRPTGRGGSAQRGFTQRGGSTRRGGSTWRGGSTWRGGSTIRRRGLPEVRGSTYCGSWRSSRTPEPESLALWRRPALAPGVPSLRGPLPVPGGYPPPARRLLPGPAPPGTPGLPAPAAPRTAPAQQWPQCATDPASWARDGSGSRAGVPGSAAASALGGCRSSGLGAHCGRPPFPCRDPRGSPQHRLCQSRGLGAPGRPGRVGRLSGGGPGRKQCLAVAVSLGRNRGRLRDSGPRTGHICTPALGVSDYTALCPGCHLDCVLSATAELPSDAAFEWASDGLLPCWSGQQSSGCASPAEFLPGCWHPSPGFWPPFCCHQRRVPCADEKAAQKGNQRGCELPPSRGSRDWSL

SEQ ID NO: 323 - DNA, 1215 bp, Derived From Human Sequence
atgggctcccctgtgccccagcccctggctccctctgttgatcccggcccctgctccaggcctcactgtgcaactgctgctgtcactgctgcttctgatgcctgtccatccccagaggttgccccggatgcaggaggattcccccttgggaggaggctcttctggggaagacccactgggcgaggaggatctgcccagagaggattcacccagagaggaggatccacccggagaggaggatctacctggagaggaggatctacctggagaggaggatctaccatcagaagaagagggctccctgaagttagaggatctacctactgtggctcctggagatcctcaagaaccccagaaccagagtcattggcgctatggaggcgacccgccctggccccgggtgtccccagcctgcgcgggccgcttccagtccccggtggatatccgcccccagctcgccgccttctgcccggccctgcgccccctggaactcctgggcttccagctcccgccgctcccagaactgcgcctgcgcaacaatggccacagtgtgcaactgaccctgcctcctgggctagagatggctctgggtcccgggcgggagtaccgggctctgcagctgcatctgcactggggggctgcaggtcgtccgggctcggagcacactgtggaaggccaccgtttccctgccgagatccacgtggttcacctcagcaccgcctttgccagagtcgaggccttggggcgcccgggaggcctggccgtgttggccgcctttctggaggagggcccggaagaaaacagtgcctagcagttgctgtctcgcttggaagaaatcgcggaaggctcagagactcaggtcccaggactggacatatctgcactcctgccctcggggtctctgactacaccgccctgtgcccagggtgtcatctggactgtgttctctcggctacagctgaacttccgagcgacgcagcctttgaatgggcgagtgatggcctccttccctgctggagtggacagcagtcctcgggctgcgccagtccagctgaattcctgcctggctgctggcatcctagccctggtttttggcctcctttttgctgtcaccagcgtcgcgttccttgtgcagatgagaaggcagcacagaaggggaaccaaagggggtgtgagctaccgcccagcagaggtagccgagactggagcctatga

SEQ ID NO: 324 - protein, 657 aa, Derived From Human Sequence [sequence omitted]

SEQ ID NO: 325 - DNA, 1974 bp, Derived From Human Sequence
atgtggagtctccctcggcccctccccacagatggtgcatcccctggcagaggctcctgctcacagcctcacttcccttctggaacccgcccaccactgccaagctcactattgaatccacgccgttcaatgtcgcagaggggaaggaggtgcttctacttgtccacaatctgccccagcatctttttggctacagctggtacaaaggtgaaagagtggatggcaaccgtcaaattagaactcaacaagctaccccagggcccgcatacagtggtcgagagatccagaacatcatccagaatgacacaggattctacaccctacacgtcaagtcagatcttgatgaagaagcaactggccagttccgggtatacccggagctgcccaagccctccatctccagcaacaactccaaacccgtggaggacaaggatgctgtggccttcacctgtgaacctgagactcaggacgcaacctacctgtggtgggacaatcagagcctcccggtcagtcccaggctgcagctgtccaatggcaacaggaccctcactctattcaatgtcacaagaaatgacacagcaagctacaaatgtgaaacccagaacccaggtgccaggcgcagtgattcagtcatccatgtcctctatggcccggatgcccccaccatttcccctcacacatcttacagatcaggggaaaatcacctctcctgccatgcagcctctaacccacctgcacagtactcttggtttgtcaatgggactttccagcaatccacccaagagctctttatccccaacatcactgataatagtggatcctatacgtgccaagcccataactcagacactggcctcaataggaccacagtcacgacgatcacagtctatgcagagccacccaaacccttcatcaccagcaacaactccaaccccgtggaggatgaggatgctgcctgtgaacctgagattcagaacacaacctacctgtggtgggataatcagagcctcccggtcagtcccaggctgcagctgtccaatgacaacaggaccctcactctactcagtgtcacaaggaatgatggaccctatgagtgtggaatccagaacgaatgtgttgaccacagcgacccagtcatccatgtcctctatggcccagacgaccccaccatttccccctcatacacctattaccgtccaggggacctcagcctctcctgccatgcagcctctaacccacctgcacagtattcttggcttgatgggaacatccagcaacacacacaagagctctttatctccaacatcactgagaagaacagcggactctatacctgccaggccaataactcagccagtggccacagcaggactacagtcaagacaatcacagtctctgcggagctgcccaagccctccatctccagcaacaactccaaacccgtggaggacaaggatgctgtggccttcacctgtgaacctgaggctcagaacacaacctacctgtggtgggatggtcagagcctcccagtcagtcccaggctgcagctgtccaatggcaacaggaccctcactctattcaatgtcacaagaaatgacgcaagagcctatgtatgtggaatccagaactcaggtgcaaaccgcagtgacccagtcaccctggatgtcctctatgggccggacacccccatcatttcccccccagactcgtcttacctttcgggagcgaacctcaacctctcctgccactcggcctctaacccatccccgcagtattcttggcgtatcaatgggataccgcagcaacacacacaagttctctttatcgccaaaatcacgccaaataataacgggacctatgcctgttttgtctctaacttggctactggccgcaataattccatcaagagcatcacagtctctgcatctggaacttctcctggtctctcagctggggccactgtcggcatcatga

SEQ ID NO: 326 - protein, 620 aa, Derived From Human Sequence [sequence omitted]

SEQ ID NO: 327 - DNA, 1863 bp, Derived From Human Sequence
atgggagtctccctcggcccctccccacagatggtgcatcccctggcagaggctcctgctcacagcctcacttctaaccttctggaacccgcccaccactgccaagctcactatatccacgccgttcaatgtcgcagaggggaaggaggtgcttctacttgtccacaatctgccccagcatctttttggctacagctggtacaaaggaagagtggatggcaaccgtcaaattataggatatgtaataggaactcaacaagctaccccagggcccgcatacagtggtcgagagataatataccccaatgcatccctgctgatccagaacatcatccagaacacaggattctacaccctacacgtcataaagtcagatcttgtgaaagaagcaactggccagttccgggtatacccggagctgcccaagccctccatctccagcaacaactccaaacccgtggaggacaaggatgctgtggccttcacctggactcaggacgcaacctacctgtggtgggtaaacaatcagagcctcccggtcagtcccaggctgcagctgtccaatggcaacaggaccctcactctattcaatgtcacaagaaaaacccagaacccagtgagtgccaggcgcagttcagtcatcctgaatgtcctctatggcccggatgcccccaccatttcccctctaaacacatcttacagatcaggggaaaatctgaacctctcctgccatgcagcctccccacctgcacagtactcttggtttgtcaatgggactttccagcaatccacccaagagctctttatccccaacatcactgtgaagaccacagtcacgacgatcacagtctatgcagagccacccaaacccttcatcaccagcaacaactccaaccccgtggaggagattcagaacacaacctacctgtggtgggtaaatcagagcctcccggtcagtcccaggctgcagctgtccaacaacaggaccctcactctactcagtgtcacaaggaagtgtggaatccagaacgaattaagtgtccacagcgacccagtcatcctgaatgtcctctatggcccagacgaccccaccatttccccctcatacacctattaccgtccaggggtgaacctcagcctctcctgccatgcagcctccccacctgcacagtattcttggctgattgggaacatccagcaacacacacaagagctctttatctccaacatcacgaagaacagcggactctatacctgccaggccaactcagccagtggccacagcaggactacagtcaagacaatcacagtctctgcggagctgcccaagccctccatctccagcaacaactccaaacccgtggaggacaaggatgctgtggccttcacctgggctcagaacacaacctacctgtggtgggtaaatggtcagagcctcccagtcagtcccaggctgcagctgtccaatggcaacaggaccctcactctattcaatgtcacaagaaacgcaagagcctatgtatgtggaatccagaactcagtgagtgcaaaccgcagcccagtcaccctggatgtcctctatgggccggacacccccatcatttcccccccagactcgtcttacctttcgggagcgaacctcaacctctcctgccactcggcctccccatccccgcagtattcttggcgtatcaatgggataccgcagcaacacacacaagttctctttatcgccaaaatcacgccaaattccatagtcaagagcatcacagtctctgcatctggaacttctcctggtctctcagctggggccactgtcggcatcatgattggagtgctggttggggttgctctgatatatga

SEQ ID NO: 328 - protein, 1167 aa, Derived From Human Sequence [sequence omitted]

SEQ ID NO: 329 - DNA, 3504 bp, Derived From Human Sequence
atgtggagctggcggccttgtgccgctgggggctcctcctcgccctcttgccccccggagccgcgagcacccaagtgtgcaccggcacagacaagctgcggctccctgccagtcccgagacccacctggacatgctccgccacctctaccagggctgccaggtggtgcagggaaacctggaactcacctacctgcccaccaatgccagcctgtccttcctgcaggatatccaggaggtgcagggctacgtgctcatcgctcacaaccaagggcaggtcccactgcagaggctgcggattgtgcgaggcacccagctctttgaggacaactatgccctggccgtgcacaatggagacccgcacaataccacccctgtcacaggggcctccccaggaggcctgcgggagctgcagcttcgaagcctcacagagatcttccagcggaacccccagctctgctaccaggacacgattttgtggaaggacatcttccacaagaacaaccagctggctctcacacacaccaaccgctctcgggcctgccacccctgttctccgatgtgtaagggctcccgctgctggggagagagttctgaggattgtcagagcccgcgcactgtctgtgccggtggctgtgcccgctgcaaggggccactgcccactgactgctgccatgagcagtgtgctgccggctgcacgggccccaagcactctgactgcctggcctgcctccacttcaaccacagtggcatctgtgagctgcactgcccagccctggtcacctacaacacagacacgtttgagtccatgcccaatcccgagggccggtatacattcggcgccagctgtgctgcctgtccctacaactacctttctacggacgtgggatcctgcaccctcgtctgccccctgcacaaccaagaggcagcagaggatggaacacagcggtgtgagaagtgcagcaagccctgtgcccgagtgtgctatggtctgggcatggagcacttgcgagagggggcagttaccagtgccaatatccaggagtttgctggctgcaagaagatctttgggagcctggcatttctgccggagagctttgatggggacccagcctccaacactgccccgctccagccagagcagctccaagtgtttgagactctggaagagatcacaggttacctatacatctcagcatggccggacagcctgcctgacctcagcgtcttccagaacctgcaagtccggggacgaattctgcacaatggcgcctactcgcccctgcaagggctgggcatcagctggctggggctgcgctcacgggaactgggcagtggactggccctcatccaccataacacccacctctgcttcgtgcacacggtgccctgggaccagctctttcggaacccgcaccaagctctgctccacactgccaaccggccagaggacgagtgtgtgggcgagggcctggcctgccaccagctgtgcgcccgagggcactgctggggtccagggcccacccagtgtgtcaactgcagccagttccttcggggccaggagtgcgtggaggaatgccgagtactgcaggggctccccagggagtatgatgccaggcactgtttgccgtgccaccctgagtgtcagccccagaatggctcagcctgttttggaccggaggctgaccagtgtgtggcctgtgcccactataaggaccctcccttctgcgtggcccgctgccccagcggtgaacctgacctctcctacatgcccatctggaagtttccagatgaggagggcgcatgccagccttgccccatcaactgcacccactcctgtgtggacctggatgacaagggctgccccgccgagcagagagccagccctccgtccatcgtctctgcggtggttggcattctgctggtcgtggtcttgggggtggtctttgggatcctcatcaagcgacggcagcagaagatccggaagtacacgatgcggagactgctgcaggaaacggagctggtggagccgccacctagcggagcgatgcccaaccaggcgcagatgcggatccaggtgcttggatctggcgcttttggcacagtctacaagggcatctggatccctgatggggagaatggggaaaacacatcccccaaagccaacaaagaaatcttggctggtgtgggctccccatatgtctcccgccttctgggcatctgcccacagcttatgccctatggctgcctctaccatgtccgggaaaaccgcggacgcctgggctcccaggacctgcactggtgtatgcagattgccaaggggagctacctggaggatgtgcggctcgtacacagggacttggccgctcggaacgtgctggtcaagagtcccaaccatgtcaaaattacagacttcgggctggctcggctgctggacattgacgagacagagtaccatgcagatgggggcaaggtgcccatcaagtggatggcgctggagtccattctccgccggcggttcacccaccagagtgatgtgtggagttatggtgcttttggggccaaaccttacgatgggatcccagcccgggagatccctgacctgctggaaaagggggagcggctgccccagccccccatctgcaccattgatgtctacattgactctgaatgtcggccaagattccgggagttggtgtctgaattctcccgcatggccagggacccccagcgctttgtggtcatccagaatgaggacttgggcccagccagtcccttggacagcaccttctaccgctcactgctggaggacgatgacatgggggacctggtggatgctgaggagtatctggtaccccagcagggcttcttctgtccagaccctgccccgggcgctgggggcatggtccaccacaggcaccgcagctcatctaccaggagtggcggtggggaccggctggagccctctgaagaggaggcccccaggtctccactggcaccctccgaaggggctggctccgatgtatttgatggtgacctgggaatgggggcagccaaggggctgcaaagcctccccacacatgaccccagccctctacagcggtacagtgaggaccccacagtacccctgccctctgagactgatggctacgttgccccccaccagccagatgttcggccccagcccccttcgccccgagagggccctctgcctgctgcccgacctgctggtgccactctggaaagggccaagactctctccccagggaagaatggggtcgtcaaagacgtttttgcctttgggggtgccgtggagaaccccgagtactcaccccagggaggagctgcccctcagccccaccctcctcctgccttcagcccagccttcgacaacctctattactgggaccaggacccaccagagcggggggctccacccagcaccttcaaagggacacctacggcagagaacccagagtacctgggtctggacgtgccagtgttga

SEQ ID NO: 330 - protein, 1187 aa, Derived From Human Sequence [sequence omitted]

SEQ ID NO: 331 - DNA, 3564 bp, Derived From Human Sequence
atgggagctggcggccttgtgccgctgggggctcctcctcgccctcttgccccccggagccgcgagcacccaagtgtgcaccggcacagacatgaagctgcggctccctgccagtcccgagacccacctggacatgctccgccacctctaccagggctgccaggtggtgcagggaaacctggaactcacctacctgcccaccaatgccagcctgtccttcctgcaggatatccaggaggtgcagggctacgtgctcatcgctcacaaccaagtgaggcaggtcccactgcagaggctgcggattgtgcgaggcacccagctcttggacaactatgccctggccgtgctagacaatggagacccgctgaacaataccacccctgtcacaggggcctccccaggaggcctgcgggagctgcagcttcgaagcctcacagagatcttgaaaggaggggtcttgatccagcggaacccccagctctgctaccaggacacgattttgtggaaggacatcttccacaagaacaaccagctggctctcacactgatagacaccaaccgctctcgggcctgccacccctgttctccgatgtggggctcccgctgctggggagagagttcggattgtcagagcctgacgcgcactgtctgtgccggtggctgtgcccgctgcaaggggccactgcccacgcagtgtgctgccggctgcacgggccccaagcactcctgcctggcctgcctccacttcaaccacagtggcatctggctgcactgcccagccctggtcacctacaacacagacacgttgtccatgcccaatcccgagggccggtatacattcggcgccagctgtgtgactgcctgtccctacaactacctttctacggacgtgggatcctgcaccctcgtctgccccctgcacaaccaagaggtgacagcagaggatggaacacagcggtggaagtgcagcaagccctgtgcccgagtgtgctatggtctgggcatggagcacttgcgagaggtgagggcagttaccagtgccaatatccaggagtttgctggctgcaagaagatctttgggagcctggcatttctgccggagagctttggggacccagcctccaacactgccccgctccagccagagcagctccaagtgttgactctggaagagatcacaggttacctatacatctcagcatggccggacagcctgcccctcagcgtcttccagaacctgcaagtaatccggggacgaattctgcacaatggcgcctactcgctgaccctgcaagggctgggcatcagctggctggggctgcgctcactgagggaactgggcagtggactggccctcatccaccacacccacctctgcttcgtgcacacggtgccctgggaccagctctttcggaacccgcaccaagctctgctccacactgccaaccggccagaggacgagtgtgtgggcgagggcctggcctgccaccagctgtgcgcccgagggcactgctggggtccagggcccacccagtgtgtcaactgcagccagttccttcggggccaggagtgcgtggaggaatgccgagtactgcaggggctccccagggagtatgtgaatgccaggcactgtttgccgtgccacccgtgtcagccccagaatggctcagtgacctgttttggaccggaggcggaccctcccttctgcgtggcccgctgccccagcggtgtgaaacccctctcctacatgcccatctggaagtttccagaggagggcgcatgccagccttgccccatcaactgcacccactcctgtgtggacctggacaagggctgccccgccgagcagagagccagccctctgacgtccatcgtctctgcggtggttggcattctgctggtcgtggtcttgggggtggtctttgggatcctcatcaagcgacggcagcagaagatccggaagtacacgatgcggagactgctgcaggaaacggagctggtggagccgctgacacccggagcgatgcccaaccaggcgcagatgcggatcctgaaagagacggagctgaggaaggtgaaggtgcttggatctggcgcttttggcacagtctacaagggcatctggatccctggggagaatgtgaaaattccagtggccatcaaagtgttgagggaaaacacatcccccaaagccaacaaagaaatcttagacgaagcatacgtgatggctggtgtgggctccccatatgtctcccgccttctgggcatctgcctgacatccacggtgcagctggtgacacagcttatgccctatggctgcctcttagaccatgtccgggaaaaccgcggacgcctgggctcccaggacctgctgaactggtgtatgcagattgccaaggggatgagctacctggaggatgtgcggctcgtacacagggacttggccgctcggaacgtgctggtcaagagtcccaaccatgtcaaaattacagacttcgggctggctcggctgctggacatcgagacagagtaccatgcagatgggggcaaggtgcccatcaagtggatggcgctggagtccattctccgccggcggttcacccaccagagtgtgtggagttatggtgtgactgtgtgggagctgatgacttttggggccaaaccttacgatgggatcccagcccgggagatccccctgctggaaaagggggagcggctgccccagccccccatctgcaccattgtctacatgatcatggtcaaatgttggatgatatgtcggccaagattccgggagttggtgtcattctcccgcatggccagggacccccagcgctttgtggtcatccagaaggacttgggcccagccagtcccttggacagcaccttctaccgctcactgctggaggacgacatgggggacctggtggatgcggagtatctggtaccccagcagggcttcttctgtccagaccctgccccgggcgctgggggcatggtccaccacaggcaccgcagctcatctaccaggagtggcggtggggacctgacactagggctggagccctcagaggaggcccccaggtctccactggcaccctccgaaggggctggctccgatgtattcctgggaatgggggcagccaaggggctgcaaagcctccccacacatggctacgttgcccccctgacctgcagcccccagccatatgtgaaccagccagatgttcggccccagcccccttcgccccgagagggccctctgcctgctgcccgacctgctggtgccactctggaaagggccaagactctctccccagggaagaatggggtcgtcaaagacgtttttgcctttgggggtgccgtggagaaccccgagtacttgacaccccagggaggagctgcccctcagccccaccctcctcctgccttcagcccagccttcgacaacctctattactgggaccaggacccaccagagcggggggctccacccagcaccttcaaagggacacctacggcagagaacccagagtacctgggtctggacgtgccagtgtgtga

SEQ ID NO: 332 - protein, 339 aa, Derived From Human Sequence [sequence omitted]

SEQ ID NO: 333 - DNA, 1020 bp, Derived From Human Sequence
atggagctgcacccctcctcctggccagggcagcaagctccttggcttcttgtttctgctttttttgctggcctttggtgtttcggcatggagaccgaagtcccattgacacctttcccactgaccccaaggaatcctcatggccacaaggatttggccaactcacccagctgggcatggagcagcattatgaacttggagagtataatgactcctataaacatgaacaggtttatattcgaagcacagacgttgaccggacttcaaacctggcagccctgtttcccccagaaggtgtcagcatctggaatcctatcctactctggcagcccatcccggtgcacacagttcctctttctgaagatcagttgctatacctgcctttcaggaactgccctcgttttcaagaacttgagagtgagacttaatcagaggaattccagaagaggctgcacccttataaggattttactaccttgggaaaactttcaggattacatggccaggacctttttggaatttggagtaaagtctacgaccctttatattctgagagtgttcacaatttcactttaccctcctgggccactgaggacaccagagaattgtcagaattgtccctcctgtccctctatggaattcacaagcagaaagagaaatctaggctccaagggggtgtcctggtcaatgaaatcctcaatcacaagagagcaactcagataccaagctacaaaaaacttatcatgtattctgcgcatgacactactgatgtttacaacggactccttcctccctatgcttcttgccactcggaattgtactttgagaagggggagtactttgtggagatgtactaccggaatgagacgcagcacgagccgtatcccctcatgctacctggctgcagccccagctgtcctctggagaggtttgctgagctggttggccctgtccctcaagactggtccacggaggttaccacaaacagccatcaaggtactgaggacagtacagatttga

SEQ ID NO: 334 - protein, 319 aa, Derived From Human Sequence [sequence omitted]

SEQ ID NO: 335 - DNA, 960 bp, Derived From Human Sequence
atggagagctgcacccctcctcctggccagggcagcaagcttagccttggcttcttgtttctgctttttttgctggctagaccgaagtgtactagccaaggagttgaagtttgtgactttggtgtttcggcatggagaccgaagtcccatccccataaaggaatcctcatggccacaaggatttggccaactcacccagctgggcatggagcagcattaacttggagagtatataagaaagagataccggactttgatgagtcgtatgacaaacctggcagccctgtttcccccagaaggtgtcagcatctggaatcctatcctactctggcagcccatcccggtgcacacagttcctctttcagatcagttgctatacctgcctttcaggaactgccctcgttttcaagaactgactttgaaatcagaggaattccagaagaggctgcacccttaggattttatagctaccttgggaaaactttcaggattacatggccaggacctttttggaatttggaggagtgttcacaatttcactttaccctcctgggccacgttgagagaattgtcagaattgtccctcctgtccctctatggaattcacaagcagaaagagaaatcaatcctcaatcacatgaagagagcaactcagataccaagctacaaaaaacttatcatgtattctgcgcacactactgtgactggcctacagatggcgctagatgtttacaacggactccttcctccctatgcttcttgccacttgacggaattgtacttgaagggggagtactttgtggagatgtactaccggaagacgcagcacgagccgtatcccctcatgctacctggctgcagccccagctgtcctctggagaggtttgcgctggttggccctgtgatccctcaagactggtccacggaggttatgaccacaaacagccatcaaggtactga

SEQ ID NO: 336 - protein, 1084 aa, Derived From Human Sequence [sequence omitted]

SEQ ID NO: 337 - DNA, 3255 bp, Derived From Human Sequence
atgtgccgcgcgctccccgctgccgagccgtgcgctccctgctgcgcagccactaccgcgaggtgctgccgctggccacgttcgtgcggcgcctggggccccagggctggcggctggtgcagcgcggggacccggcggctttccgcgcgctggtggcccagtgcctggtgtgcgtgccctgggacgcacggccgccccccgccgccccctccttccgccaggtgtcctgccaggagctggtggcccgagtgctgcagaggctgtgcgagcgcggcgcgaagaacgtgctggccttcggcttcgcgctgctggacggggcccgcgggggcccccccgaggccttcaccaccagcgtgcgcagctacctgcccaacacggccgacgcactgcgggggagcggggcgtgggggctgctgctgcgccgcgtgggcgacgacgtgctggttcacctgctggcacgctgcgcgctctttgtgctggtggctcccagctgcgcctaccaggtgtgcgggccgccgctgtaccagctcggcgctgccactcaggcccggcccccgccacacgctagtggaccccgaaggcgtctgggatgcgaacgggcctggaaccatagcgtcagggaggccggggtccccctgggcctgccagccccgggtgcgaggaggcgcgggggcagtgccagccgaagtctgccgttgcccaagaggcccaggcgtggcgctgcccctgagccggagcggacgcccgttgggcaggggtcctgggcccacccgggcaggacgcgtggaccgagtgaccgtggtttctgtgtggtgtcacctgccagacccgccgaagaagccacctctttggagggtgcgctctctggcacgcgccactcccacccatccgtgggccgccagcaccacgcgggccccccatccacatcgcggccaccacgtccctgggacacgccttgtcccccggtgtacgccgagaccaagcacttcctctactcctcaggcgacaaggagcagctgcggccctccttcctactcagctctcctggcgctcggaggctcgtggagaccatctttctgggttccaggccctggatgccagggactccccgcaggttgccccgcctgccccagcgctactggcaaatgcggcccctgtttctggagctgcttgggaaccacgcgcagtgcccctacggggtgctcctcaagacgcactgcccgctgcgagctgcggtcaccccagcagccggtgtctgtgcccgggagaagccccagggctctgtggcggcccccgaggaggaggacacagacccccgtcgcctggtgcagctgctccgccagcacagcagcccctggcaggtgtacggcttcgtgcgggcctgcctgcgccggctggtgcccccaggcctctggggctccaggcacaacgaacgccgcttcctcaggaacaccaagaagttcatctccctggggaagcatgccaagctctcgctgcaggagcgcgtgcgggactgcgcttggctgcgcaggagcccaggggttggctgtgttccggccgcagagcaccgtctgcgtgaggagatcctggccaagttcctgcactggcgtgtgtacgtcgtcgagctgctcaggtctttcttttatgtcacggagaccacgtttcaaaagaacaggctctttttctaccggaagagtgtctggagcaagttgcaaagcattggaatcagacagcactagagggtgcagctgcgggagctgtcggaagcagaggtcaggcagcatcgggaagccaggcccgccctgccgtccagactccgcttcatccccaagcctgacgggctgcggccgattgacatggactacgtcgtgggagccagaacgttccgcagagaaaagagggccgagcgtctcacctcgagggaggcactgttcagcgtgctcaactacgagcgggcgcggcgccccggcctcctgggcgcctctgtgctgggcctggacgatatccacagggcctggcgcaccttcgtgctgcgtgtgcgggcccaggacccgccgcctgagctgtactttgtcaaggtggatgcgggcgcgtacgacaccatcccccaggacaggctcacggaggtcatcgccagcatcatcaaaccccagaacacgtactgcgtgcgtcggtatgccgtggtccagaaggccgcccatgggcacgtccgcaaggccttcaagagccacgtctctacctcagacctccagccgtacatgcgacagttcgtggctcacctgcaggagaccagcccgcgggatgccgtcgtcatcgagcagagctcctcccatgaggccagcagtggcctcttcgacgtcttcctacgcttcatgtgccaccacgccgtgcgcatcaggggcaagtcctacgtccagtgccaggggatcccgcagggctccatcctctccacgctgctctgcagcctgtgctacggcgacatggagaacaagctgtttgcggggattcggcgggacgggctgctcctgcgtttggtggatgatttcttgttggcacctcacctcacccacgcgaaaaccttcctcaggaccctggtccgaggtgtccctgagtatggctgcgtggaagacgaggccctgggtggcacggcttttgttcagatgccggcccacggcctattcccctggtgcggcctgctgctggatacccggaccctggaggtgcagagcgactactccagctatgcccggacctccatcagagccagtctcaccttcaaccgcggcttcaaggctgggaggaacatgcgtcgcaaactctttggggtcttgcggcagtgtcacagcctgtttctggatttgcaggacagcctccagacggtgtgcaccaacatctacaagatcctcctgctgcaggcgtacaggtttcacgcatgtgtgctgcagctcccatttcatcagcaagtttggaagaaccccacatttttcctgcgcgtcatctctgacacggcctccctctgctactccatccaagccaagaacgcagggatgtcgctgggggccaagggcgccgccggccctctgccctccgaggccgtgcagtggctgtgccaccaagcattcctgctcaagcctcgacaccgtgtcacctacgtgccactcctggggtcactcaggacagcccagacgcagcctgccctggaggccgcagccaacccggcactgccctcagacttcaagaccatcctggacttga

SEQ ID NO: 338 - protein, 1122 aa, Derived From Human Sequence [sequence omitted]

SEQ ID NO: 339 - DNA, 3369 bp, Derived From Human Sequence
atggccgcgcgctccccgctgccgagccgtgcgctccctgctgcgcagccactaccgcgaggtgctgccgctggccacgttcgtgcggcgcctggggccccagggctggcggctggtgcagcgcggggacccggcggctttccgcgcgctggtggcccagtgcctggtgtgcgtgccctgggacgcacggccgccccccgccgccccctccttccgccaggtgtcctgcctgaaggagctggtggcccgagtgctgcagaggctgtgcgagcgcggcgcgaagaacgtgctggccttcggcttcgcgctgctggacggggcccgcgggggcccccccgaggccttcaccaccagcgtgcgcagctacctgcccaacacggtgaccgacgcactgcgggggagcggggcgtgggggctgctgctgcgccgcgtgggcgacgacgtgctggttcacctgctggcacgctgcgcgctctttgtgctggtggctcccagctgcgcctaccaggtgtgcgggccgccgctgtaccagctcggcgctgccactcaggcccggcccccgccacacgctggaccccgaaggcgtctgggatgcgaacgggcctggaaccacgtcagggaggccggggtccccctgggcctgccagccccgggtgcgaggaggcgcgggggcagtgccagccgaagtctgccgttgcccaagaggcccaggcgtggcgctgccccgccggagcggacgcccgttgggcaggggtcctgggcccacccgggcaggacgcgtggaccgagccgtggtttctgtgtggtgtcacctgccagacccgccgaagaagccacctctttggagggtgcgctctctggcacgcgccactcccacccatccgtgggccgccagcaccacgcgggccccccatccacatcgcggccaccacgtccctgggacacgccttgtcccccggtgtacgccgagaccaagcacttcctctactcctcaggcgacaaggagcagctgcggccctccttcctactcagctctctgaggcccagcctgactggcgctcggaggctcgtggagaccatctttctgggttccaggccctggatgccagggactccccgcaggttgccccgcctgccccagcgctactggcaaatgcggcccctgtttctggagctgcttgggaaccacgcgcagtgcccctacggggtgctcctcaagacgcactgcccgctgcgagctgcggtcaccccagcagccggtgtctgtgcccgggagaagccccagggctctgtggcggcccccgaggaggaggacacagacccccgtcgcctggtgcagctgctccgccagcacagcagcccctggcaggtgtacggcttcgtgcgggcctgcctgcgccggctggtgcccccaggcctctggggctccaggcacaacgaacgccgcttcctcaggaacaccaagaagttcatctccctggggaagcatgccaagctctcgctgcaggagctgacgtggaagatgagcgtgcgggactgcgcttggctgcgcaggagcccaggggttggctgtgttccggccgcagagcaccgtctgcgggagatcctggccaagttcctgcactggctgatgagtgtgtacgtcgtcgagctgctcaggtctttcttttatgtcacggagaccacgtttcaaaagaacaggctctttttctaccggaagagtgtctggagcaagttgcaaagcattggaatcagacagcacttgaagagggtgcagctgcgggagctgtcggaagcagaggtcaggcagcatcgggaagccaggcccgccctgctgacgtccagactccgcttcatccccaagcccgggctgcggccgattgtgaacatggactacgtcgtgggagccagaacgttccgcagagaaaagagggccgagcgtctcacctcgagggtgaaggcactgttcagcgtgctcaactacgagcgggcgcggcgccccggcctcctgggcgcctctgtgctgggcctggacgatatccacagggcctggcgcaccttcgtgctgcgtgtgcgggcccaggacccgccgccgctgtactttgtcaaggtggatgtgacgggcgcgtacgacaccatcccccaggacaggctcacggaggtcatcgccagcatcatcaaaccccagaacacgtactgcgtgcgtcggtatgccgtggtccagaaggccgcccatgggcacgtccgcaaggccttcaagagccacgtctctaccttgacagacctccagccgtacatgcgacagttcgtggctcacctgcaggagaccagcccgctgagggatgccgtcgtcatcgagcagagctcctccctgaaggccagcagtggcctcttcgacgtcttcctacgcttcatgtgccaccacgccgtgcgcatcaggggcaagtcctacgtccagtgccaggggatcccgcagggctccatcctctccacgctgctctgcagcctgtgctacggcgacatggagaacaagctgtttgcggggattcggcgggacgggctgctcctgcgtttggtggatttcttgttggtgacacctcacctcacccacgcgaaaaccttcctcaggaccctggtccgaggtgtcccgtatggctgcgtggtgaacttgcggaagacagtggtgaacttccctgtagaagacgaggccctgggtggcacggcttttgttcagatgccggcccacggcctattcccctggtgcggcctgctgctggatacccggaccctggaggtgcagagcgactactccagctatgcccggacctccatcagagccagtctcaccttcaaccgcggcttcaaggctgggaggaacatgcgtcgcaaactctttggggtcttgcggctgaagtgtcacagcctgtttctggatttgcaggtgaacagcctccagacggtgtgcaccaacatctacaagatcctcctgctgcaggcgtacaggtttcacgcatgtgtgctgcagctcccatttcatcagcaagtttggaagaaccccacatttttcctgcgcgtcatctccacggcctccctctgctactccatcctgaaagccaagaacgcagggatgtcgctgggggccaagggcgccgccggccctctgccctccgaggccgtgcagtggctgtgccaccaagcattcctgctcaagctgactcgacaccgtgtcacctacgtgccactcctggggtcactcaggacagcccagacgcagctgagtcggaagctcccggggacgacgctgactgccctggaggccgcagccaacccggcactgccctcagacttcaagaccatcctggactgtga

SEQ ID NO: 340 - protein, 994 aa, Derived From Human Sequence [sequence omitted]

SEQ ID NO: 341 - DNA, 2985 bp, Derived From Human Sequence
atgtgtcctttcgggcagccaggctcagcaggaacagaaggaatgacactctggacagcacccggaccctgtactccagcgcgtctcggagcacagacttgtcttacagtgaaagcgacttggattttattcaagcaaattttaagaaacgagaatgtgtcttctttatcaaagattccaaggccacggagaatgtgtgcaagtgtggctatgcccagagccagcacatggaaggcacccagatcaaccaaagtgagaaatggaactacaagaaacacaccaaggaatttcctaccgacgcctttggggatattcagtttgagacactggggaagaaagggaagtatatacgtctgtcctgcgacacggacgcggaaatcctttacgagctgcagccgcgcatgcgcaagatcttcagccggctcatctacatcgcgcagtccaaaggtgcttggattctcacgggaggcacccattatggccgagataacaccatcagcaggagttcagaggagaatattgtggccattggcacagcttggggcatggtctccaaccgggacaccctcatcaggaattgcgatgctgagggctatttttcccagtaccttatggatgacttcacaagagatccactgtatatcctggacaacaaccacacacatttgctgctcgtggacaatggctgtcatggacatcccactgtcgaagcaaagctccggaatcagcagaagtatatctctgagcgcactattcaagattccaactatggtggcaagatccccattgtgtgttttgcccaaggaggtggaaaagagacttaagccatcaatacctccatcaaaaataaaattccttgtgtggtggtggaaggctcgggccagatcgctgatgtcgctagcctggtggaggtggaggatgccccatcttctgccgtcaaggagaagctggtgcgctttttaccccgcacggtgtcccggctgcctgaggaggagactgagagttggatcaaatggctcaaagaaattctcgaatgttctcacctatcagttattaaaatggaagaagctggggatgaaattggcaatgccatctcctacgctctatacaaagccttcagcaccagtgagcaagacaaggataactggaatgggcagcagcttctgctggagtggaaccagctggactccaatgatgagattttcaccaatgaccgccgatgggagtctgctgaccttcaagaagtcatgtttacggctctcaaggacagacccaagtttgtccgcctctttctggagaatggctacctacggaagtttctcacccatgatgtcctcactgaactcttctccaaccacttcagcacgcttgtgtaccggaatctgcagatcgccaagaattcctataatgatgccctcctcacgtttgtctggaaactggttgcgaacttccgaagaggcttccggaaggaagacagaaatggccgggacgagatggacaaactccacgacgtgtctcctattactcggcaccccctgcaagctctcttcatctgggccattcttcagaataagaaggaactctccaaagtcatttgggagcagaccaggggctgcactctggcagccctgggagccagcaagcttcagaacgacatcaatgctgctggggagtccgaggagctggctaatgagtacgagacccgggctgttgagctgttcactgagtgttacagcagcgatgaagacttggcagaacagctgctggtctattcctgtgaagcttggggtggaagcaactgtctggagctggcggtggaggccacagaccagcatttcatcgcccagcctggggtccagaattttctttctaagcaatggtatggagagatttcccgagacaccaagaactggaagattatcctgtgtctgtttattatacccttggtgggctgtggctttgtatcatttaggaagaaacctgtcgacaagcacaagaagctgctttggtactatgtggcgttcttcacctcccccttcgtggtcttctcctggaatgtggtcttctacatcgccttcctcctgctgtttgcctacgtgctgctcatggatttccattcggtgccacacccccccgagctggtcctgtactcgctggtctttgtcctcttctgtgatgaagtggacacgctggggcttttttacttcacaggaattgtatttcggctccactcttctaataaaagctctttgtattctggacgagtcattttctgtctggactacattattttcactctcgatgtgttcttcttcctgttcctctttgcggtgtggatggtggcctttggcgtggccaggcaagggatccttaggcagaatgagcagcgctggaggtggatattccgttcggtcatctacgagccctacctggccatgttcggccaggtgcccagtgacgtggatggtaccacgtatgactttgcccactgcaccttcactgggaatgagtccaagccactgtgtgtggagctggatgagcacaacctgccccggttccccgagtggatcaccatccccctggtgtgcatctacatgttatccaccaacatcctgctggtcaacctgctggtcgccatgtttggctacacggtgggcaccgtccaggagaacaatgaccaggtctggaagttccagaggtacttcctggtgcaggagtactgcagccgcctcaatatccccttccccttcatcgtcttcgcttacttctacatggtggagaagtgcttcaagtgttgctgcaaggagaaaaacatggagtcttctgtctgctgtttcaaaaatgaagacaatgagactctggcatgggagggtgtcaaggaaaactaccttgtcaagatcaacacaaaagccaacgacacctcagaggaaaggcatcgatttagacaactggatacaaagcttaatgatctcaagggtcttctga

SEQ ID NO: 342 - protein, 980 aa, Derived From Human Sequence [sequence omitted]

SEQ ID NO: 343 - DNA, 2943 bp, Derived From Human Sequence
atggtcctttcgggcagccaggctcagcatgaggaacagaaggaacactctggacagcacccggaccctgtactccagcgcgtctcggagcacagacttgtcttacagaagcgacttggtgaattttattcaagcaaatttgaaacgagaatgtgtcttctttatcaaagattccaaggccacggagaatgtgtgcaagtgtggctatgcccagagccagcacatggaaggcacccagatcaaccaaaggaaatggaactacaagaaacacaccaaggaatttcctaccgacgcctttggggatattcagttgacactggggaagaaagggaagtatatacgtctgtcctgcgacacggacgcggaaatcctttacgagctgctgacccagcactggcacctgaaaacacccaacctggtcatttctgtgaccgggggcgccaagaacttcgccctgaagccgcgcatgcgcaagatcttcagccggctcatctacatcgcgcagtccaaaggtgcttggattctcacgggaggcacccattatggcctgatgaagtacatcggggaggtggtgagagacaccatcagcaggagttcagaggagaatattgtggccattggcatagcagcttggggcatggtctccaaccgggacaccctcatcaggaattgcgatgcgggctattttttagcccagtaccttatggacttcacaagagatccactgtatatcctggacaacaaccacacacatttgctgctcgtggacaatggctgtcatggacatcccactgtcgaagcaaagctccggaatcagctagagaagtatatctcgcgcactattcaagattccaactatggtggcaagatccccattgtgtgttttgcccaaggaggtggaaaagagactttgaaagccatcaatacctccatcaaaaaaattccttgtgtggtggtggaaggctcgggccagatcgccctggtggaggtggaggatgccctgacatcttctgccgtcaaggagaagctggtgcgctttttaccccgcacggtgtcccggctgccgagttggatcaaatggctcaaagaaattctcgaatgttctcacctattaacagttataattgtgagcaatgccatctcctacgctctatacaaagccttcagcaccagctggaatgggcagctgaagcttctgctggagtggaaccagctggacttagccaaccttcaagaagtcatgtttacggctctcataaaggacagacccaagtttgtccgcctctttctggagaatggcttgaacctacggaagtttctcacccaactcttctccaaccacttcagcacgcttgtgtaccggaatctgcagatcgccaagaattcctatgccctcctcacgtttgtctggaaactggttgcgaacttccgaagaggcttccggaaggaagacagaaatggccgggacgagatggacatagaactccacgacgtgtctcctattactcggcaccccctgcaagctctcttcatctgggccattcttcagaagaaggaactctccaaagtcatttgggagcagaccaggggctgcactctggcagccctgggagccagcaagcttctgaagactctggccaaagtgaagaacgacatcaatgctgctggggagtccgaggagctggcagacttggcagaacagctgctggtctattcctgagcttggggtggaagcaactgtctggagctggcggtggaggccacagaccagcatttcatcgcccagcctggggtccagaattttctttcgcaatggtatggagagatttcccgagacaccaagaactggaagattatcctgtgtctgtttattatacccttggtgggctgtggctttgtatcattgaagaaacctgtcgacaagcacaagaagctgctttggtactatgtggcgttcttcacctcccccttcgtggtcttctcctggaatgtggtcttctacatcgccttcctcctgctgtttgcctacgtgctgctcatggatttccattcggtgccacacccccccgagctggtcctgtactcgctggtctttgtcctcttctgagtgagacagtggtacgtaaatggggtgaattattttaccctgtggaatgtgatggacacgctggggcttttttacttcatagcaggaattgtatttcggctccactcttcaagctctttgtattctggacgagtcattttctgtctggactacattattttcactctaagattgatccacatttttactgtaagcagaaacttaggacccaagattataatgctgcagaggatgctgatcgatgtgttcttcttcctgttcctctttgcggtgtggatggtggcctttggcgtggccaggcaagggatcctgcagcgctggaggtggatattccgttcggtcatctacgagccctacctggccatgttcggccaggtgcccagctttgcccactgcaccttcactgggaagtccaagccactgtgtgtggagctggagcacaacctgccccggttccccgagtggatcaccatccccctggtgtgcatctacatgttatccaccaacatcctgctggtcaacctgctggtcgccatgtttggctacacggtgggcaccgtccaggagaacaaccaggtctggaagttccagaggtacttcctggtgcaggagtactgcagccgcctcaatatccccttccccttcatcgtcttcgcttacttctacatggtggtgaagaagtgcttcaagtgttgctgcaaggagaaaaacatggagtcttctgtctgctgtttcaaaaagactctggcatgggagggtgtcatgaaggaaaactaccttgtcaagatcaacacaaaagccaacgacacctcagaggaaatgaggcatcgatttga

SEQ ID NO: 344 - protein, 750 aa, Human
MWNLLHETDSAVATARRPRWLCAGALVLAGGFFLLGFLFGWFIKSSNEATNITPKHNMKAFLDELKAENIKKFLYNFTQIPHLAGTEQNFQLAKQIQSQWKEFGLDSVELAHYDVLLSYPNKTHPNYISIINEDGNEIFNTSLFEPPPPGYENVSDIVPPFSAFSPQGMPEGDLVYVNYARTEDFFKLERDMKINCSGKIVIARYGKVFRGNKVKNAQLAGAKGVILYSDPADYFAPGVKSYPDGWNLPGGGVQRGNILNLNGAGDPLTPGYPANEYAYRRGIAEAVGLPSIPVHPIGYYDAQKLLEKMGGSAPPDSSWRGSLKVPYNVGPGFTGNFSTQKVKMHIHSTNEVTRIYNVIGTLRGAVEPDRYVILGGHRDSWVFGGIDPQSGAAVVHEIVRSFGTLKKEGWRPRRTILFASWDAEEFGLLGSTEWAEENSRLLQERGVAYINADSSIEGNYTLRVDCTPLMYSLVHNLTKELKSPDEGFEGKSLYESWTKKSPSPEFSGMPRISKLGSGNDFEVFFQRLGIASGRARYTKNWETNKFSGYPLYHSVYETYELVEKFYDPMFKYHLTVAQVRGGMVFELANSIVLPFDCRDYAVVLRKYADKIYSISMKHPQEMKTYSVSFDSLFSAVKNFTEIASKFSERLQDFDKSNPIVLRMMNDQLMFLERAFIDPLGLPDRPFYRHVIYAPSSHNKYAGESFPGIYDALFDIESKVDPSKAWGEVKRQIYVAAFTVQAAAETLSEVA

SEQ ID NO: 345 - DNA, 2653 bp, Human
ctcaaaaggggccggatttccttctcctggaggcagatgttgcctctctctctcgctcggattggttcagtgcactctagaaacactgctgtggtggagaaactggaccccaggtctggagcgaattccagcctgcagggctgataagcgaggcattagtgagattgagagagactttaccccgccgtggtggttggagggcgcgcagtagagcagcagcacaggcgcgggtcccgggaggccggctctgctcgcgccgagatgtggaatctccttcacgaaaccgactcggctgtggccaccgcgcgccgcccgcgctggctgtgcgctggggcgctggtgctggcgggtggcttctttctcctcggcttcctcttcgggtggtttataaaatcctccaatgaagctactaacattactccaaagcataatatgaaagcatttttggatgaattgaaagctgagaacatcaagaagttcttatataattttacacagataccacatttagcaggaacagaacaaaactttcagcttgcaaagcaaattcaatcccagtggaaagaatttggcctggattctgttgagctagcacattatgatgtcctgttgtcctacccaaataagactcatcccaactacatctcaataattaatgaagatggaaatgagattttcaacacatcattatttgaaccacctcctccaggatatgaaaatgtttcggatattgtaccacctttcagtgctttctctcctcaaggaatgccagagggcgatctagtgtatgttaactatgcacgaactgaagacttctttaaattggaacgggacatgaaaatcaattgctctgggaaaattgtaattgccagatatgggaaagttttcagaggaaataaggttaaaaatgcccagctggcaggggccaaaggagtcattctctactccgaccctgctgactactttgctcctggggtgaagtcctatccagatggttggaatcttcctggaggtggtgtccagcgtggaaatatcctaaatctgaatggtgcaggagaccctctcacaccaggttacccagcaaatgaatatgcttataggcgtggaattgcagaggctgttggtcttccaagtattcctgttcatccaattggatactatgatgcacagaagctcctagaaaaaatgggtggctcagcaccaccagatagcagctggagaggaagtctcaaagtgccctacaatgttggacctggctttactggaaacttttctacacaaaaagtcaagatgcacatccactctaccaatgaagtgacaagaatttacaatgtgataggtactctcagaggagcagtggaaccagacagatatgtcattctgggaggtcaccgggactcatgggtgtttggtggtattgaccctcagagtggagcagctgttgttcatgaaattgtgaggagctttggaacactgaaaaaggaagggtggagacctagaagaacaattttgtttgcaagctgggatgcagaagaatttggtcttcttggttctactgagtgggcagaggagaattcaagactccttcaagagcgtggcgtggcttatattaatgctgactcatctatagaaggaaactacactctgagagttgattgtacaccgctgatgtacagcttggtacacaacctaacaaaagagctgaaaagccctgatgaaggctttgaaggcaaatctctttatgaaagttggactaaaaaaagtccttccccagagttcagtggcatgcccaggataagcaaattgggatctggaaatgattttgaggtgttcttccaacgacttggaattgcttcaggcagagcacggtatactaaaaattgggaaacaaacaaattcagcggctatccactgtatcacagtgtctatgaaacatatgagttggtggaaaagttttatgatccaatgtttaaatatcacctcactgtggcccaggttcgaggagggatggtgtttgagctagccaattccatagtgctcccttttgattgtcgagattatgctgtagttttaagaaagtatgctgacaaaatctacagtatttctatgaaacatccacaggaaatgaagacatacagtgtatcatttgattcacttttttctgcagtaaagaattttacagaaattgcttccaagttcagtgagagactccaggactttgacaaaagcaacccaatagtattaagaatgatgaatgatcaactcatgtttctggaaagagcatttattgatccattagggttaccagacaggcctttttataggcatgtcatctatgctccaagcagccacaacaagtatgcaggggagtcattcccaggaatttatgatgctctgtttgatattgaaagcaaagtggacccttccaaggcctggggagaagtgaagagacagatttatgttgcagccttcacagtgcaggcagctgcagagactttgagtgaagtagcctaagaggattctttagagaatccgtattgaatttgtgtggtatgtcactcagaaagaatcgtaatgggtatattgataaattttaaaattggtatatttgaaataaagttgaatattatatataaaaaaaaaaaaaaaaaaa

SEQ ID NO: 346 - protein, 652 aa, Human [sequence omitted]

SEQ ID NO: 347 - DNA, 1959 bp, Human
atgtgtggaatctccttcacgaaaccgactcggctgtggccaccgcgcgccgcccgcgctggctgtgcgctggggcgctggtgctggcgggtggcttctttctcctcggcttcctcttcgggtggtttaaatcctccaatgaagctactaacattactccaaagcataataaagctgagaacatcaagaagttcttatataattttacacagataccacattcaggaacagaacaaaactttcagcttgcaaagcaaattcaatcccagtggaaagaatttggcctggattctgttgagccacattatgatgtcctgttgtcctacccaaataagactcatcccaactacatctcaattaatgaagatggaaatgagattttcaacacatcattatttgaaccacctcctccaggatatgaaaatgtttcggatattgtaccacctttcagtgctttctctcctcaaggaatgccagagggcgatctgtatgttaactatgcacgaactgaagacttctttaaattggaacgggacattgccagatatgggaaagttttcagaggaaataaggttaaaaatgcccagctggcaggggccaaaggagtcattctctactccgaccctgctgactactttgctcctggggagtcctatccagatggttggaatcttcctggaggtggtgtccagcgtggaaatatccatggtgcaggagaccctctcacaccaggttacccagcaaatgaatatgcttataggcgtggaattgcagaggctgttggtcttccaagtattcctgttcatccaattggatactatgatgcacagaagctccaaaaaatgggtggctcagcaccaccagatagcagctggagaggaagtctcaaagtgccctacaatgttggacctggctttactggaaacttttctacacaaaaagtcaagatgcacatccactctaccaatgaaggtactctcagaggagcagtggaaccagacagatatgtcattctgggaggtcaccgggactcatgggtgtttggtggtattgaccctcagagtggagcagctgttgttcatgaaattgaaaaggaagggtggagacctagaagaacaattttgtttgcaagctgggatgcagaagaatttggtcttcttggttctactgagtgggcagaggagaattcaagactccttcaagagcgtggcgtggcttatattaatgctgactcatctaaaagccctgatgaaggctttgaaggcaaatctctttatgaaagttggactaaaaaaagtccttccccagagttcagtggcatgcccaggagcaaattgggatctggaaatgattttgaggtgttcttccaacgacttggaattgcttcaggcagagcacggtatactaaaaattgggaaacaaacaaattcagcggctatccactgtatcacagtgtctatgaaacatatgagttggtggaaaagttttatgatccaatgtttaaatatcacctcactgtggcccaggttcgaggagggatggtgtttgagctgctcccttttgattgtcgagattatgctggaaagtatgctgacaaaatctacagtatttctaagacatacagtgtatcatttgattcacttttttctgcagagaattttacagaaattgcttccaagttcagtgagagactccaggactttgacaaaagcaacccaaatgatcaactcatgtttctggaaagagcatttattgatccatggttaccagacaggcctttttataggcatgtcatctatgctccaagcagccacaacaagtatgcaggggagtcattcccaggaatttatgatgctctgtttgatattgaaagcaaagtggacccttccaaggcctggggagaagagagacagatttatgttgcagccttcacagtgcaggcagctgcagagactttga

SEQ ID NO: 348 - protein, 598 aa, Human [sequence omitted]

SEQ ID NO: 349 - DNA, 1797 bp, Human
atggtggaatctccttcacgaaaccgactcggctgtggccaccgcgcgccgcccgcgctggctgtgcgctggggcgctggtgctggcgggtggcttctttctcctcggcttcctcttcgggtggtttataaaatcctccaattttacacagataccacatttagcaggaacagaacaaaactttcagcttgcaaagcaaattcaatcccagtggaaagaatttggcctggattctgtgactcatcccaactacatctcaataataaatgtttcggatattgtaccacctttcagtgctttctctcctcaaggaatgccagagggcgatctagtgtatgtattggaacgggacatgaaaatcaattgctctgggaaaattgtaattgccagatatgggaaagttttcagaggaaaaaatgcccagctggcaggggccaaaggagtcattctctactccgaccctgcctactttgctcctggggtgaagtcctatccagatggttggaatcttcctggaggtggtgtccagcgtggaaatatcctaaatctgaatggtgcaggagaccctctcacaccaggttacccagcaaagcgtggaattgcagaggctgttggtcttccaagtattcctgttcatccaattggatactatgcacagaagctcctagaaaaaatgggtggctcagcaccaccagacagctggagaggaagtctcaaagtgccctacaatgttggacctggctttactggaaacttttctacacaaaaagtcaagatgcacatccactctaccaaagtgacaagaatttacaatgtgataggtactctcagaggagcagtggaaccagacagatatgtcattctgggaggtcaccgggactcatgggtgtttggtggtatccctcagagtggagcagctgttgttcaaattgtgaggagctttggaacactgaaaaaggaagggtggagaccaagaacaattttgtttgcaagctgggatgcagaagaatttggtcttcttggttctacgtgggcagaggagaattcaagactccttcaagagcgtggcgtggcttatatctcatctatagaaggaaactacactctgagagtttgtacaccgctgatgtacagcttggtacacaacctaacaaaagagctgaaaagcccaaaaagtccttccccagagttcagtggcatgcccaggataagcaaattgggatctggaaaggtgttcttccaacgacttggaattgcttcaggcagagcacggtatacaaattgggaaacaaacaaattcagcggctatccactgtatcacagtgtctaatatcacctcactgtggcccaggttcgaggagggatggtgttgctagccaattccatagtgctccctttttgtcgagattatgctgtagttttaagaaagtatgccaaaatctacagtatttctatgaaacatccacaggaaatgaagacatacagtgtatcattttcacttttttctgcagtaaagaattttacagaaattgcttccaagttcagcaaaagcaacccaatagtattaagaatgatgaatcaactcatgtttctggaaagagcatttattccattagggttaccagacaggcctttttagcatgtcatctatgctccaagcagccacaacaagtatgcaggggagtcattcccaggaatttaaagcaaagtggacccttccaaggcctggggagaagtgaagagacagatttatgttgcagccttcacagtgcaggcagctgcagagactttgagtga

SEQ ID NO: 350 - protein, 42 aa, Human
CGISFTKPTRLWPPRAARAGCALGRWCWRVASFSSASSSGGL

SEQ ID NO: 351 - protein, 46 aa, Human
VESPSRNRLGCGHRAPPALAVRWGAGAGGWLLSPRLPLRVVYKILQ

SEQ ID NO: 352 - protein, 11 aa, Human
MKLLTLLQSII

SEQ ID NO: 353 - protein, 17 aa, Human
MMSCCPTQIRLIPTTSQ

SEQ ID NO: 354 - protein, 42 aa, Human
MKMEMRFSTHHYLNHLLQDMKMFRILYHLSVLSLLKECQRAI

SEQ ID NO: 355 - protein, 16 aa, Human
MLTMHELKTSLNWNGT

SEQ ID NO: 356 - protein, 34 aa, Human
MGKFSEEIRLKMPSWQGPKESFSTPTLLTTLLLG

SEQ ID NO: 357 - protein, 15 aa, Human
MVGIFLEVVSSVEIS

SEQ ID NO: 358 - protein, 44 aa, Human
MVQETLSHQVTQQMNMLIGVELQRLLVFQVFLFIQLDTMMHRSS

SEQ ID NO: 359 - protein, 24 aa, Human
MLDLALLETFLHKKSRCTSTLPMK

SEQ ID NO: 360 - protein, 28 aa, Human
MSFWEVTGTHGCLVVLTLRVEQLLFMKL

SEQ ID NO: 361 - protein, 34 aa, Human
MQKNLVFLVLLSGQRRIQDSFKSVAWLILMLTHL

SEQ ID NO: 362 - protein, 27 aa, Human
MKALKANLFMKVGLKKVLPQSSVACPG

SEQ ID NO: 363 - protein, 68 aa, Human
MILRCSSNDLELLQAEHGILKIGKQTNSAAIHCITVSMKHMSWWKSFMIQCLNITSLWPRFEEGWCLS

SEQ ID NO: 364 - protein, 9 aa, Human
MLTKSTVFL

SEQ ID NO: 365 - protein, 14 aa, Human
MINSCFWKEHLLIH

SEQ ID NO: 366 - protein, 39 aa, Human
MSSMLQAATTSMQGSHSQEFMMLCLILKAKWTLPRPGEK

SEQ ID NO: 367 - protein, 13 aa, Human
MLQPSQCRQLQRL

SEQ ID NO: 368 - protein, 261 aa, Human
MWVPVVFLTLSVTWIGAAPLILSRIVGGWECEKHSQPWQVLVASRGRAVCGGVLVHPQWVLTAAHCIRNKSVILLGRHSLFHPEDTGQVFQVSHSFPHPLYDMSLLKNRFLRPGDDSSHDLMLLRLSEPAELTDAVKVMDLPTQEPALGTTCYASGWGSIEPEEFLTPKKLQCVDLHVISNDVCAQVHPQKVTKFMLCAGRWTGGKSTCSGDSGGPLVCNGVLQGITSWGSEPCALPERPSLYTKVVHYRKWIKDTIVANP

SEQ ID NO: 369 - DNA, 1446 bp, Human
attccgccggagagctgtgtcaccatgtgggtcccggttgtcttcctcaccctgtccgtgacgtggattggtgctgcacccctcatcctgtctcggattgtgggaggctgggagtgcgagaagcattcccaaccctggcaggtgcttgtggcctctcgtggcagggcagtctgcggcggtgttctggtgcacccccagtgggtcctcacagctgcccactgcatcaggaacaaaagcgtgatcttgctgggtcggcacagcctgtttcatcctgaagacacaggccaggtatttcaggtcagccacagcttcccacacccgctctacgatatgagcctcctgaagaatcgattcctcaggccaggtgatgactccagccacgacctcatgctgctccgcctgtcagagcctgccgagctcacggatgctgtgaaggtcatggacctgcccacccaggagccagcactggggaccacctgctacgcctcaggctggggcagcattgaaccagaggagttcttgaccccaaagaaacttcagtgtgtggacctccatgttatttccaatgacgtgtgtgcgcaagttcaccctcagaaggtgaccaagttcatgctgtgtgctggacgctggacagggggcaaaagcacctgctcgggtgattctgggggcccacttgtctgtaatggtgtgcttcaaggtatcacgtcatggggcagtgaaccatgtgccctgcccgaaaggccttccctgtacaccaaggtggtgcattaccggaagtggatcaaggacaccatcgtggccaacccctgagcacccctatcaactccctattgtagtaaacttggaaccttggaaatgaccaggccaagactcaagcctccccagttctactgacctttgtccttaggtgtgaggtccagggttgctaggaaaagaaatcagcagacacaggtgtagaccagagtgtttcttaaatggtgtaattttgtcctctctgtgtcctggggaatactggccatgcctggagacatatcactcaatttctctgaggacacagataggatggggtgtctgtgttatttgtggggtacagagatgaaagaggggtgggtaccacactgagagagtggagagtgacatgtgctggacactgtccatgaagcactgagcagaagctggaggcacaacgcaccagacactcacagcaaggatggagctgaaaacataacccactctgtcctggaggcactgggaagcctagagaaggctgtgagccaaggagggagggtcttcctttggcatgggatggggatgaagtaaggagagggactggaccccctggaagctgattcactatggggggaggtgtattgaagtcctccagacaaccctcagatttgatgatttcctagtagaactcacagaaataaagagctgttatacgtg

SEQ ID NO: 370 - protein, 253 aa, Human [sequence omitted]

SEQ ID NO: 371 - DNA, 762 bp, Human
atgtgtgggtcccggttgtcttcctcaccctgtccgcgtggattggtgctgcacccctcatcctgtctcggattgtgggaggctgggagtgcgagaagcattcccaaccctggcaggtgcttgtggcctctcgtggcagggcagtctgcggcggtgttctggtgcacccccagtgggtcctcacagctgcccactgcatcaggaacaaaagcgtcttgctgggtcggcacagcctgtttcatcctgaagacacaggccaggtatttcaggtcagccacagcttcccacacccgctctacgataagaatcgattcctcaggccaggtgatgactccagccacgacctcatgctgctccgcctgtcagagcctgccgagctcacggatgctgaggtcatggacctgcccacccaggagccagcactggggaccacctgctacgcctcaggctggggcagcattgaaccagaggagttctccccaaagaaacttcagtgtgtggacctccatgttatttccaatgacgtgtgtgcgcaagttcaccctcagaaggccaagttcatgctgtgtgctggacgctggacagggggcaaaagcacctgctcgggtgattctgggggcccacttgtctgtaatggtgtgcttcaaggtatcacgtcatggggcagtgaaccatgtgccctgcccgaaaggccttccctgtacaccaaggtggtgcattaccggaagtggatcaaggacaccatcgtggccaaccccttga

SEQ ID NO: 372 - protein, 247 aa, Human [sequence omitted]

SEQ ID NO: 373 - DNA, 744 bp, Human
atggtgggtcccggttgtcttcctcaccctgtccgtgacgtggattggtgctgcacccctcatcctgtctcggattgtgggaggctgggagtgcgagaagcattcccaaccctggcaggtgcttgtggcctctcgtggcagggcagtctgcggcggtgttctggtgcacccccagtgggtcctcacagctgcccactgcatcaggaacaaaagcgtgatcttgctgggtcggcacagcctgtttcatccagacacaggccaggtatttcaggtcagccacagcttcccacacccgctctacgatatgagcctcctgaagaatcgattcctcaggccaggctccagccacgacctcatgctgctccgcctgtcagagcctgccgagctcacggatgctgtgaaggtcatggacctgcccacccaggagccagcactggggaccacctgctacgcctcaggctggggcagcataccagaggagttcttgaccccaaagaaacttcagtgtgtggacctccatgttatttccaacgtgtgtgcgcaagttcaccctcagaaggtgaccaagttcatgctgtgtgctggacgctggacagggggcaaaagcacctgctcgggtggtgtgcttcaaggtatcacgtcatggggcagaccatgtgccctgcccgaaaggccttccctgtacaccaaggtggtgcattaccggaagtggatcaaggacaccatcgtggccaacccctgtga

SEQ ID NO: 374 - protein, 11 aa, Human
CGSRLSSSPCP

SEQ ID NO: 375 - protein, 82 aa, Human
VGPGCLPHPVRDVDWCCTPHPVSDCGRLGVREAFPTLAGACGLSWQGSLRRCSGAPPVGPHSCPLHQEQKRDLAGSAQPVSS

SEQ ID NO: 376 - protein, 21 aa, Human
MTPATTSCCSACQSLPSSRML

SEQ ID NO: 377 - protein, 15 aa, Human
MLFPMTCVRKFTLRR

SEQ ID NO: 378 - protein, 42 aa, Human
MVCFKVSRHGAVNHVPCPKGLPCTPRWCITGSGSRTPSWPTP

SEQ ID NO: 379 - protein, 28 aa, Human
MCPARKAFPVHQGGALPEVDQGHHRGQP

SEQ ID NO: 380 - protein, 393 aa, Human [sequence omitted]

SEQ ID NO: 381 - DNA, 1303 bp, Human
gtccaggagcaggtagctgctgggctccggggacactttgcgttcgggctgggagcgtgctttccacgacggtgacacgcttccctggattggcagccagactgccttccgggtcactgccatggaggagccgcagtcagatcctagcgtcgagccccctctgagtcaggaaacattttcagacctatggaaactacttcctgaaaacaacgttctgtcccccttgccgtcccaagcaatggatgatttgatgctgtccccggacgatattgaacaatggttcactgaagacccaggtccagatgaagctcccagaatgccagaggctgctccccccgtggcccctgcaccagcgactcctacaccggcggcccctgcaccagccccctcctggcccctgtcatcttctgtcccttcccagaaaacctaccagggcagctacggtttccgtctgggcttcttgcattctgggacagccaagtctgtgacttgcacgtactcccctgccctcaacaagatgttttgccaactggccaagacctgccctgtgcagctgtgggttgattccacacccccgcccggcacccgcgtccgcgccatggccatctacaagcagtcacagcacatgacggaggttgtgaggcgctgcccccaccatgagcgctgctcagatagcgatggtctggcccctcctcagcatcttatccgagtggaaggaaatttgcgtgtggagtatttggatgacagaaacacttttcgacatagtgtggtggtgccctatgagccgcctgaggttggctctgactgtaccaccatccactacaactacatgtgtaacagttcctgcatgggcggcatgaaccggaggcccatcctcaccatcatcacactggaagactccagtggtaatctactgggacggaacagctttgaggtgcgtgtttgtgcctgtcctgggagagaccggcgcacagaggaagagaatctccgcaagaaaggggagcctcaccacgagctgcccccagggagcactaagcgagcactgcccaacaacaccagctcctctccccagccaaagaagaaaccactggatggagaatatttcacccttcagatccgtgggcgtgagcgcttcgagatgttccgagagctgaatgaggccttggaactcaaggatgcccaggctgggaaggagccaggggggagcagggctcactccagccacctgaagtccaaaaagggtcagtctacctcccgccataaaaaactcatgttcaagacagaagggcctgactcagactga

SEQ ID NO: 382 - protein, 383 aa, Human [sequence omitted]

SEQ ID NO: 383 - DNA, 1152 bp, Human
atgtggaggagccgcagtcagatcctagcgtcgagccccctcgtcaggaaacattttcagacctatggaaactacttcctgaaaacaacgttctgtcccccttgccgtcccaagcaatggatgatttgctgtccccggacgatattgaacaatggttcactgaagacccaggtccagatgaagctcccagaatgccagaggctgctccccccgtggcccctgcaccagcgactcctacaccggcggcccctgcaccagccccctcctggcccctgtcatcttctgtcccttcccagaaaacctaccagggcagctacggtttccgtctgggcttcttgcattctgggacagccaagtctgcttgcacgtactcccctgccctcaacaagatgttttgccaactggccaagacctgccctgtgcagctgtgggttgattccacacccccgcccggcacccgcgtccgcgccatggccatctacaagcagtcacagcacaggcgctgcccccaccatgagcgctgctcagatagcgatggtctggcccctcctcagcatcttatccgagtggaaggaaatttgcgtgtggagtatttggatgacagaaacacttttcgacatagtgtggtggtgccctatgagccgcctgaggttggctctgactgtaccaccatccactacaactacatgtgtaacagttcctgcatgggcggcaaccggaggcccatcctcaccatcatcacactggaagactccagtggtaatctactgggacggaacagctttgaggtgcgtgtttgtgcctgtcctgggagagaccggcgcacagaggaagagaatctccgcaagaaaggggagcctcaccacgagctgcccccagggagcactaagcgagcactgcccaacaacaccagctcctctccccagccaaagaagaaaccactggatggagaatatttcacccttcagatccgtgggcgtgagcgcttcgagatgttccgagagcatgaggccttggaactcaaggatgcccaggctgggaaggagccaggggggagcagggctcactccagccaccagtccaaaaagggtcagtctacctcccgccataaaaaactcatgttcaagacagaagggcctgactcagacttga

SEQ ID NO: 384 - protein, 318 aa, Human [sequence omitted]

SEQ ID NO: 385 - DNA, 957 bp, Human
atgcgtcgagccccctctgagtcaggaaacattttcagacctatggaaactacttccaaacaacgttctgtcccccttgccgtcccaagcaatggaagctcccagaatgccagaggctgctccccccgtggcccctgcaccagcgactcctacaccggcggcccctgcaccagccccctcctggcccctgtcatcttctgtcccttcccagaaaacctaccagggcagctacggtttccgtctgggcttcttgcattctgggacagccaagtctgtgacttgcacgtactcccctgccctcaacaagatgttttgccaactggccaagacctgccctgtgcagctgtgggtttccacacccccgcccggcacccgcgtccgcgccatggccatctacaagcagtcacagcacatgacggaggttgtgaggcgctgcccccaccacgatggtctggcccctcctcagcatcttatccgagtggaaggaaatttgcgtgtggagtatttggactgtaccaccatccactacaactacatgtgcagttcctgcatgggcggcatgaaccggaggcccatcctcaccatcatcacactggaagactccagtggggtgcgtgtttgtgcctgtcctgggagagaccggcgcacagaggaagagaatctccgcaagaaaggggagcctcaccacgagctgcccccagggagcacgcgagcactgcccaacaacaccagctcctctccccagccaaagaagaaaccactggatggagaatatttcacccttcagatccgtgggcggcgcttcgagatgttccgagagctgaaggccttggaactcaaggatgcccaggctgggaaggagccaggggggagcagggctcactccagccacctgaagtccaaaaagggtcagtctacctcccgccaaaaactcatgttcaagacagaagggcctga

SEQ ID NO: 386 - protein, 13 aa, Human
WRSRSQILASSPL

SEQ ID NO: 387 - protein, 61 aa, Human
MKLPECQRLLPPWPLHQRLLHRRPLHQPPPGPCHLLSLPRKPTRAATVSVWASCILGQPSL

SEQ ID NO: 388 - protein, 67 aa, Human
MSAAQIAMVWPLLSILSEWKEICVWSIWMTETLFDIVWWCPMSRLRLALTVPPSTTTTCVTVPAWAA

SEQ ID NO: 389 - protein, 20 aa, Human
MENISPFRSVGVSASRCSES

SEQ ID NO: 390 - protein, 24 aa, Human
MRPWNSRMPRLGRSQGGAGLTPAT

SEQ ID NO: 391 - protein, 1280 aa, Human [sequence omitted]

SEQ ID NO: 392 - DNA, 4646 bp, Human
cctactctattcagatattctccagattcctaaagattagagatcatttctcattctcctaggagtactcacttcaggaagcaaccagataaaagagaggtgcaacggaagccagaacattcctcctggaaattcaacctgtttcgcagtttctcgaggaatcagcattcagtcaatccgggccgggagcagtcatctgtggtgaggctgattggctgggcaggaacagcgccggggcgtgggctgagcacagcgcttcgctctctttgccacaggaagcctgagctcattcgagtagcggctcttccaagctcaaagaagcagaggccgctgttcgtttcctttaggtctttccactaaagtcggagtatcttcttccaagatttcacgtcttggtggccgttccaaggagcgcgaggtcgggatggatcttgaaggggaccgcaatggaggagcaaagaagaagaacttttttaaactgaacaataaaagtgaaaaagataagaaggaaaagaaaccaactgtcagtgtattttcaatgtttcgctattcaaattggcttgacaagttgtatatggtggtgggaactttggctgccatcatccatggggctggacttcctctcatgatgctggtgtttggagaaatgacagatatctttgcaaatgcaggaaatttagaagatctgatgtcaaacatcactaatagaagtgatatcaatgatacagggttcttcatgaatctggaggaagacatgaccaggtatgcctattattacagtggaattggtgctggggtgctggttgctgcttacattcaggtttcattttggtgcctggcagctggaagacaaatacacaaaattagaaaacagttttttcatgctataatgcgacaggagataggctggtttgatgtgcacgatgttggggagcttaacacccgacttacagatgatgtctctaagattaatgaagttattggtgacaaaattggaatgttctttcagtcaatggcaacatttttcactgggtttatagtaggatttacacgtggttggaagctaacccttgtgattttggccatcagtcctgttcttggactgtcagctgctgtctgggcaaagatactatcttcatttactgataaagaactcttagcgtatgcaaaagctggagcagtagctgaagaggtcttggcagcaattagaactgtgattgcatttggaggacaaaagaaagaacttgaaaggtacaacaaaaatttagaagaagctaaaagaattgggataaagaaagctattacagccaatatttctataggtgctgctttcctgctgatctatgcatcttatgctctggccttctggtatgggaccaccttggtcctctcaggggaatattctattggacaagtactcactgtattcttttctgtattaattggggcttttagtgttggacaggcatctccaagcattgaagcatttgcaaatgcaagaggagcagcttatgaaatcttcaagataattgataataagccaagtattgacagctattcgaagagtgggcacaaaccagataatattaagggaaatttggaattcagaaatgttcacttcagttacccatctcgaaaagaagttaagatcttgaagggcctgaacctgaaggtgcagagtgggcagacggtggccctggttggaaacagtggctgtgggaagagcacaacagtccagctgatgcagaggctctatgaccccacagaggggatggtcagtgttgatggacaggatattaggaccataaatgtaaggtttctacgggaaatcattggtgtggtgagtcaggaacctgtattgtttgccaccacgatagctgaaaacattcgctatggccgtgaaaatgtcaccatggatgagattgagaaagctgtcaaggaagccaatgcctatgactttatcatgaaactgcctcataaatttgacaccctggttggagagagaggggcccagttgagtggtgggcagaagcagaggatcgccattgcacgtgccctggttcgcaaccccaagatcctcctgctggatgaggccacgtcagccttggacacagaaagcgaagcagtggttcaggtggctctggataaggccagaaaaggtcggaccaccattgtgatagctcatcgtttgtctacagttcgtaatgctgacgtcatcgctggtttcgatgatggagtcattgtggagaaaggaaatcatgatgaactcatgaaagagaaaggcatttacttcaaacttgtcacaatgcagacagcaggaaatgaagttgaattagaaaatgcagctgatgaatccaaaagtgaaattgatgccttggaaatgtcttcaaatgattcaagatccagtctaataagaaaaagatcaactcgtaggagtgtccgtggatcacaagcccaagacagaaagcttagtaccaaagaggctctggatgaaagtatacctccagtttccttttggaggattatgaagctaaatttaactgaatggccttattttgttgttggtgtattttgtgccattataaatggaggcctgcaaccagcatttgcaataatattttcaaagattataggggtttttacaagaattgatgatcctgaaacaaaacgacagaatagtaacttgttttcactattgtttctagcccttggaattatttcttttattacatttttccttcagggtttcacatttggcaaagctggagagatcctcaccaagcggctccgatacatggttttccgatccatgctcagacaggatgtgagttggtttgatgaccctaaaaacaccactggagcattgactaccaggctcgccaatgatgctgctcaagttaaaggggctataggttccaggcttgctgtaattacccagaatatagcaaatcttgggacaggaataattatatccttcatctatggttggcaactaacactgttactcttagcaattgtacccatcattgcaatagcaggagttgttgaaatgaaaatgttgtctggacaagcactgaaagataagaaagaactagaaggtgctgggaagatcgctactgaagcaatagaaaacttccgaaccgttgtttctttgactcaggagcagaagtttgaacatatgtatgctcagagtttgcaggtaccatacagaaactctttgaggaaagcacacatctttggaattacattttccttcacccaggcaatgatgtatttttcctatgctggatgtttccggtttggagcctacttggtggcacataaactcatgagctttgaggatgttctgttagtattttcagctgttgtctttggtgccatggccgtggggcaagtcagttcatttgctcctgactatgccaaagccaaaatatcagcagcccacatcatcatgatcattgaaaaaacccctttgattgacagctacagcacggaaggcctaatgccgaacacattggaaggaaatgtcacatttggtgaagttgtattcaactatcccacccgaccggacatcccagtgcttcagggactgagcctggaggtgaagaagggccagacgctggctctggtgggcagcagtggctgtgggaagagcacagtggtccagctcctggagcggttctacgaccccttggcagggaaagtgctgcttgatggcaaagaaataaagcgactgaatgttcagtggctccgagcacacctgggcatcgtgtcccaggagcccatcctgtttgactgcagcattgctgagaacattgcctatggagacaacagccgggtggtgtcacaggaagagatcgtgagggcagcaaaggaggccaacatacatgccttcatcgagtcactgcctaataaatatagcactaaagtaggagacaaaggaactcagctctctggtggccagaaacaacgcattgccatagctcgtgcccttgttagacagcctcatattttgcttttggatgaagccacgtcagctctggatacagaaagtgaaaaggttgtccaagaagccctggacaaagccagagaaggccgcacctgcattgtgattgctcaccgcctgtccaccatccagaatgcagacttaatagtggtgtttcagaatggcagagtcaaggagcatggcacgcatcagcagctgctggcacagaaaggcatctatttttcaatggtcagtgtccaggctggaacaaagcgccagtgaactctgactgtatgagatgttaaatactttttaatatttgtttagatatgacatttattcaaagttaaaagcaaacacttacagaattatgaagaggtatctgtttaacatttcctcagtcaagttcagagtcttcagagacttcgtaattaaaggaacagagtgagagacatcatcaagtggagagaaatcatagtttaaactgcattataaattttataacagaattaaagtagattttaaaagataaaatgtgtaattttgtttatattttcccatttggactgtaactgactgccttgctaaaagattatagaagtagcaaaaagtattgaaatgtttgcataaagtgtctataataaaactaaactttcatgtg

SEQ ID NO: 393 - protein, 1085 aa, Human [sequence omitted]

SEQ ID NO: 394 - DNA, 3258 bp, Human
atgtggatcttgaaggggaccgcaatggaggagcaaagaagaagaacttttttaaacacaataaaagtgaaaaagataagaaggaaaagaaaccaactgtcagtgtattttcaatgtttcgctattcaaattggcttgacaagttgtatatggtggtgggaactttggctgccatcatccatggggctggacttcctctcacagatatctttgcaaatgcaggaaatttgtcaaacatcactaatagaagtgatatcaatgatacagggttcttcaccaggtatgcctattattacagtggaattggtgctggggtgctggttgctgcttacattcaggtttcattttggtgcctggcagctggaagacaaatacacaaaattagaaaacagttttttcatgctagctggtttgatgtgcacgatgttggggagcttaacacccgacttacagatgatgtctctaagattaatgaagttattggtgacaaaattggaatgttctttcagtcaatggcaacatttttcactgggtttagatttacacgtggttggaagcttttggccatcagtcctgttcttggactgtcagctgctgtctgggcaaagatactatcttcatttactgataaagaactctctgaagaggtcttggcagcaattagaactgttgcatttggaggacaaaagaaagaacttgaaaggtacaacaaaaattagaaagctattacagccaatatttctagtgctgctttcctgctctatgcatcttatgctctggccttctggtatgggaccaccttggtcctctcaggggaatattctattggacaagtactcactgtattcttttctgtatttggggcttttagtgttggacaggcatctccaagcattgaagcatttgcaaatgcaagaggagcagcttatgaaatcttcaagattgataataagccaagtattgacagctattcgaagagtgggcacaaaccagataatattaagggaaatttggaattcagaaatgttcacttcagttacccatctcgaaaagaagttaagatctaggtgcagagtgggcagacggtggccctggttggaaacagtggctgtgggaagagcacaacagtccagctgcagaggctctatgaccccacagaggggatggtcagtgttgatggacaggatattaggaccaggtttctacgggaaatcattggtgtgggtcaggaacctgtattgtttgccaccacgactgaaaacattcgctatggccgtgaaaatgtcaccatggatgagattgagaaagctgtcaaggaagccaatgcctatgactttatcaaactgcctcataaatttgacaccctggttggagagagaggggcccagtgtggtgggcagaagcagaggatcgccattgcacgtgccctggttcgcaaccccaagatcctcctgctggatgaggccacgtcagccttggacacagaaagcgaagcagtggttcaggtggctctggataaggccagaaaaggtcggaccaccattgctcatcgtttgtctacagttcgtaatgctgacgtcatcgctggtttcgatgatggagtcattgtggagaaaggaaatcatgatgaactcaaagagaaaggcatttacttcaaacttgtcacaatgcagacagcaggaaatgaagttgaataaaatgcagctgatgaatccaaaagtgaaattgatgccttggaaatgtcttcaaatgattcaagatccagtcgaaaaagatcaactcgtaggagtgtccgtggatcacaagcccaagacagaaagcttagtaccaaagaggctctggatgaaagtatacctccagtttccttttggaggattactgaatggccttattttgttgttggtgtattttgtgccattaatggaggcctgcaaccagcatttgcaagggtttttacaagaattgatgatcctgaaacaaaacgacagaatagtaacttgttttcactattgtttccccttggaattatttcttttattacatttttccttcagggtttcacatttggcaaagctggagagatcctcaccaagcggctccgatacatggttttccgatccatgctcagacaggatggttggtttgatgaccctaaaaacaccactggagcatctaccaggctcgccaatgatgctgctcaagttaaaggggctattatatccttcatctatggttggcaacaaggtgctgggaagatcgctactgaagcaactcaggagcagaagtttgaacatatgtatgctcagagtttgcaggtaccatacagaaactcttggaaagcacacatctttggaattacattttccttcacccaggcaatgtatttttcctatgctggatgtttccggtttggagcctacttggtggcacataaactcatattttcagctgttgtctttggtgccatggccgtggggcaagtcagttcatttgctcctgactatgccaaagccaaaatatcagcagcccacatcatcatgccgaacacattggaaggaaatgtcacatttggtgaagttgtattcaactatcccacccgaccggacatcccagtgcttcagggacagaagggccagacgctggctctggtgggcagcagtggctgtgggaagagcacagtggtccagctcctggagcggttctacgaccccttggcagggaaagtgctgcttgatggcaaagaaaatgttcagtggctccgagcacacctgggcatcgtgtcccaggagcccatcctgtttgactgcagcattgctgagaacattgcctatggagacaacagccgggtggtgtcacaggaagagatcggggcagcaaaggaggccaacatacatgccttcatcgagtcactgcctaataaatatagcactaaaggagacaaaggaactcagctctctggtggccagaaacaacgcattgccactcgtgcccttgttagacagcctcatattttgcttttggatgaagccacgtcagctctggatacagaaagtgaaaaggttgtccaagaagccctggacaaagccagagaaggccgcacctgcattgttgctcaccgcctgtccaccatccagaatgcagacttggtgtttcagaatggcagagtcaaggagcatggcacgcatcagcagctgctggcacagaaaggcatctatttttcaatggtcagtgtccaggctggaacaaagcgccagttga

SEQ ID NO: 395 - protein, 1050 aa, Human [sequence omitted]

SEQ ID NO: 396 - DNA, 3153 bp, Human
atgaggggaccgcaatggaggagcaaagaagaagaactttttgaaggaaaagaaaccaactgtcagtgtattttcaatgtttcgctattcaaattggctcaagttgtatatggtggtgggaactttggctgccatcatccatggggctggacttcctctcatgatgctggtgtttggagaaatgacagatatctttgcaaatgcaggaaatttagaagatctgatgtcaaacatcacaagtatcaatacagggttcttcatgaatctggaggaagacatgaccaggtatgcctattattacagtggaattggtgctggggtgctggttgctgcttacattcaggtttcattttggtgcctggcagctggaagacaaatacacaaaataaaacagttttttcatgctataatgcgacaggagataggctggttcaaaattggaatgttctttcagtcaatggcaacatttttcactgggtttatagtaggatttacacgtggttggaagctaacccttgtgattttggccatcagtcctgttcttggactgtcagctgctgtctgggcaaagatactatcttcatttacagaactcttagcgtatgcaaaagctggagcagtagcaactgtgattgcatttggaggacaaaagaaagaactaaggtacaacaaaaatttagaagaagcaagaattgggataaagaaagctattacagccaatatttctataggtgctgctttcctgctgatctatgcatcttatgctctggccttctggtatgggaccaccttggtcctctcaggggaatattctattggacaagtactcactgtattcttttctgtattaattggggctttagcatttgcaaatgcaagaggagcagcttacagctattcgaagagtgggcacaaaccagagggaaatttggaattcagaaatgttcacttcagttacccatctcgaaaagaagtgatcttgaagggcctgaacctgaaggtgcagagtgggcagacggtggccctggttggaaacagtggctgtgggaagagcacaacagtccagctgatgcagaggctctagaccataaatgtaaggtttctacgggaaatcattggtgtggtgagtcaggaacctgtattgtttgccaccacgatagcgaaagctgtcaaggaagccaatgcctacaccctggttggagagagaggggcccagttgagtggtgggcagaagcagaggatcgccattgcacgtgccctggttcgcaaccccaagatcctcctgctggaggccacgtcagccttggacacagaaagcgaagcagtggttcaggtggctctggaggccagaaaaggtcggaccaccattgtgatagctcatcgtttgtctacagttcgtggagtcattgtggagaaaggaaatcaactcatgaaagagaaaggcatttacttcaaacttgtcacaatgcagacagcaggaaattcaagatccagtctaataagaaaaagatcaactcggagtgtccgtggatcacaagcccaagacagaaagcttaccaaagaggctctggaaagtatacctccagtttccttttggaggattatgaagctaaatttaacatggccttattttgttgttggtgtattttgtgccattataaatggaggcctgcaaccagcatttgcaataatattttcaaagattataggggtttttacaagaatcttgttttcactattgtttctagcccttggaattatttcttttattacatttttccttcagggtttcacatttggcaaagctggagagatcctcaccaagcggctccgatacatggttttccgatccatgctcagacaggatgtgagttggttaaacaccactggagcattgactaccaggctcgccaaaggggctataggttccaggcttgctgtaattacccagaatatagcaaatcttgggacaggaataattatatccttcatctatggttggcaactaacactgttactcttagcaattgtacccatcattgcaatagcaggagttgtaatgaaaatgttgtctggacaagcactgaaagagaaagaactagaaggtgctgggaagatcgctacagcaatagaaaacttccgaaccgttgtttctttgactcaggagcagaagttacatatgtatgctcagagtttgcaggtaccatacagaaactctttgaggaaagcacacatctttggaattacattttccttcacccaggcaatgatgtatttttcctatgctggatgtttccggtttggagcctacttggtggcacaggatgttctgttagtattttcagctgttgtctttggtgccatggccgtggggcaagtcagttcatttgctccctatgccaaagccaaaatatcagcagcccacatcatcatgatcatcagctacagcacggaaggcctaatgccgaacacattggaaggaaatgtcacatttggagttgtattcaactatcccacccgaccggacatcccagtgcttcagggactgagcctggaggtgaagaagggccagacgctggctctggtgggcagcagtggctgtgggaagagcacagtggtccagctcctggagcggttctacgaccccttggcagggaaagtgctgcttggcaaagaaataaagcgactgaatgttcagtggctccgagcacacctgggcatcgtgtcccaggagcccatcctgttgaacattgcctatggagacaacagccgggtggtgtcacaggaagagatcgtgagggcagcaaaggaggccaacatacatgccttcatcgagtcactgccagtaggagacaaaggaactcagctctctggtggccagaaacaacgcattgccatagctcgtgcccttgtagccacgtcagctctggatacagaaagaaaggttgtccaagaagccctggacaaagccagagaaggccgcacctgcattgtgattgctcaccgcctgtccaccatccagaatgcagacttaatagtggtgtttcagaatggcagagtcaaggagcatggcacgcatcagcagctgctggcacagaaaggcatctatttttcaatggtcagtgtccaggctggaacaaagcgccagtgtga

SEQ ID NO: 397 - protein, 18 aa, Human
WILKGTAMEEQRRRTFLN

SEQ ID NO: 398 - protein, 41 aa, Human
MPIITVELVLGCWLLLTFRFHFGAWQLEDKYTKLENSFFML

SEQ ID NO: 399 - protein, 41 aa, Human
MCTMLGSLTPDLQMMSLRLMKLLVTKLECSFSQWQHFSLGL

SEQ ID NO: 400 - protein, 32 aa, Human
MHLMLWPSGMGPPWSSQGNILLDKYSLYSFLY

SEQ ID NO: 401 - protein, 11 aa, Human
MQEEQLMKSSR

SEQ ID NO: 402 - protein, 14 aa, Human
MFTSVTHLEKKLRS

SEQ ID NO: 403 - protein, 17 aa, Human
MTPQRGWSVLMDRILGP

SEQ ID NO: 404 - protein, 24 aa, Human
MAVKMSPWMRLRKLSRKPMPMTLS

SEQ ID NO: 405 - protein, 29 aa, Human
MRPRQPWTQKAKQWFRWLWIRPEKVGPPL

SEQ ID NO: 406 - protein, 22 aa, Human
MLTSSLVSMMESLWRKEIMMNS

SEQ ID NO: 407 - protein, 23 aa, Human
MQLMNPKVKLMPWKCLQMIQDPV

SEQ ID NO: 408 - protein, 12 aa, Human
MKVYLQFPFGGL

SEQ ID NO: 409 - protein, 35 aa, Human
MALFCCWCILCHYKWRPATSICNNIFKDYRGFYKN

SEQ ID NO: 410 - protein, 9 aa, Human
MEACNQHLQ

SEQ ID NO: 411 - protein, 17 aa, Human
MILKQNDRIVTCFHYCF

SEQ ID NO: 412 - protein, 9 aa, Human
MTLKTPLEH

SEQ ID NO: 413 - protein, 9 aa, Human
MMLLKLKGL

SEQ ID NO: 414 - protein, 12 aa, Human
MLRVCRYHTETL

SEQ ID NO: 415 - protein, 16 aa, Human
MLDVSGLEPTWWHINS

SEQ ID NO: 416 - protein, 11 aa, Human
MFPVWSLLGGT

SEQ ID NO: 417 - protein, 12 aa, Human
MPKPKYQQPTSS

SEQ ID NO: 418 - protein, 22 aa, Human
MSHLVKLYSTIPPDRTSQCFRD

SEQ ID NO: 419 - protein, 41 aa, Human
MFSGSEHTWASCPRSPSCLTAALLRTLPMETTAGWCHRKRS

SEQ ID NO: 420 - protein, 14 aa, Human
MPSSSHCLINIALK

SEQ ID NO: 421 - protein, 29 aa, Human
MKPRQLWIQKVKRLSKKPWTKPEKAAPAL

SEQ ID NO: 422 - protein, 33 aa, Human
MAESRSMARISSCWHRKASIFQWSVSRLEQSAS

SEQ ID NO: 423 - protein, 609 aa, Human
MKWVESIFLIFLLNFTESRTLHRNEYGIASILDSYQCTAEISLADLATIFFAQFVQEATYKEVSKMVKDALTAIEKPTGDEQSSGCLENQLPAFLEELCHEKEILEKYGHSDCCSQSEEGRHNCFLAHKKPTPASIPLFQVPEPVTSCEAYEEDRETFMNKFIYEIARRHPFLYAPTILLWAARYDKIIPSCCKAENAVECFQTKAATVTKELRESSLLNQHACAVMKNFGTRTFQAITVTKLSQKFTKVNFTEIQKLVLDVAHVHEHCCRGDVLDCLQDGEKIMSYICSQQDTLSNKITECCKLTTLERGQCIIHAENDEKPEGLSPNLNRFLGDRDFNQFSSGEKNIFLASFVHEYSRRHPQLAVSVILRVAKGYQELLEKCFQTENPLECQDKGEEELQKYIQESQALAKRSCGLFQKLGEYYLQNAFLVAYTKKAPQLTSSELMAITRKMAATAATCCQLSEDKLLACGEGAADIIIGHLCIRHEMTPVNPGVGQCCTSSYANRRPCFSSLVVDETYVPPAFSDDKFIFHKDLCQAQGVALQTMKQEFLINLVKQKPQITEEQLEAVIADFSGLLEKCCQGQEQEVCFAEEGQKLISKTRAALGV

SEQ ID NO: 424 - DNA, 2032 bp, Human
tccatattgtgcttccaccactgccaataacaaaataactagcaaccatgaagtgggtggaatcaatttttttaattttcctactaaattttactgaatccagaacactgcatagaaatgaatatggaatagcttccatattggattcttaccaatgtactgcagagataagtttagctgacctggctaccatattttttgcccagtttgttcaagaagccacttacaaggaagtaagcaaaatggtgaaagatgcattgactgcaattgagaaacccactggagatgaacagtcttcagggtgtttagaaaaccagctacctgcctttctggaagaactttgccatgagaaagaaattttggagaagtacggacattcagactgctgcagccaaagtgaagagggaagacataactgttttcttgcacacaaaaagcccactccagcatcgatcccacttttccaagttccagaacctgtcacaagctgtgaagcatatgaagaagacagggagacattcatgaacaaattcatttatgagatagcaagaaggcatcccttcctgtatgcacctacaattcttctttgggctgctcgctatgacaaaataattccatcttgctgcaaagctgaaaatgcagttgaatgcttccaaacaaaggcagcaacagttacaaaagaattaagagaaagcagcttgttaaatcaacatgcatgtgcagtaatgaaaaattttgggacccgaactttccaagccataactgttactaaactgagtcagaagtttaccaaagttaattttactgaaatccagaaactagtcctggatgtggcccatgtacatgagcactgttgcagaggagatgtgctggattgtctgcaggatggggaaaaaatcatgtcctacatatgttctcaacaagacactctgtcaaacaaaataacagaatgctgcaaactgaccacgctggaacgtggtcaatgtataattcatgcagaaaatgatgaaaaacctgaaggtctatctccaaatctaaacaggtttttaggagatagagattttaaccaattttcttcaggggaaaaaaatatcttcttggcaagttttgttcatgaatattcaagaagacatcctcagcttgctgtctcagtaattctaagagttgctaaaggataccaggagttattggagaagtgtttccagactgaaaaccctcttgaatgccaagataaaggagaagaagaattacagaaatacatccaggagagccaagcattggcaaagcgaagctgcggcctcttccagaaactaggagaatattacttacaaaatgcgtttctcgttgcttacacaaagaaagccccccagctgacctcgtcggagctgatggccatcaccagaaaaatggcagccacagcagccacttgttgccaactcagtgaggacaaactattggcctgtggcgagggagcggctgacattattatcggacacttatgtatcagacatgaaatgactccagtaaaccctggtgttggccagtgctgcacttcttcatatgccaacaggaggccatgcttcagcagcttggtggtggatgaaacatatgtccctcctgcattctctgatgacaagttcattttccataaggatctgtgccaagctcagggtgtagcgctgcaaacgatgaagcaagagtttctcattaaccttgtgaagcaaaagccacaaataacagaggaacaacttgaggctgtcattgcagatttctcaggcctgttggagaaatgctgccaaggccaggaacaggaagtctgctttgctgaagagggacaaaaactgatttcaaaaactcgtgctgctttgggagtttaaattacttcaggggaagagaagacaaaacgagtctttcattcggtgtgaacttttctctttaattttaactgatttaacactttttgtgaattaatgaaatgataaagacttttatgtgagatttccttatcacagaaataaaatatctccaaatg

SEQ ID NO: 425 - protein, 508 aa, Human [sequence omitted]

SEQ ID NO: 426 - DNA, 1527 bp, Human
atgattttactgaatccagaacactgcatagaaatgaatatggaacttccatattggattcttaccaatgtactgcagagactgacctggctaccatattttttgcccagtttgttcaagaagccacttacaaggaagctgcaattgagaaacccactggagatgaacagtcttcagggtgttaaaaccagctacctgcctttctggaagaactttgccatgagaaagaaattttggagaagtacggacattcagactgctgcagccaaagtgaagagggaagacataactgttttcttgcacacaaaaagcccactccagcatcgatcccacttttccaagttccagaacctgtcacaagctgtgaagcatatgaagaagacagggagacattcacaagaaggcatcccttcctgtatgcacctacaattcttctttgggctgctcgctatgacaaaattccatcttgctgcaaagctgaaaatgcagttgaatgcttccaaacaaaggcagcaacagttacaaaagaataaaattttgggacccgaactttccaagccagtcagaagtttaccaaagttaattttactgaaatccagaaactcctggatgtggcccatgtacatgagcactgttgcagaggagatgtgctggattgtctgcaggatggggaaaaaatcatgtcctacatatgttctcaacaagacactctgtcaaacaaaaccacgctggaacgtggtcaatgtattcatgcagaaaatgatgaaaaacctgaaggtctatctccaaatcgagatagagattttaaccaattttcttcaggggaaaaaaatatcttcttggcaagttttgttcatgaatattcaagaagacatcctcagcttgctgtctcaggagttgctaaaggataccaggagttattggagaagtgtttccagactgaaaaccctcttgaatgccaagataaaggagaagaagaattacagaaatacatccaggagagccaagcattggcaaagcgaagctgcggcctcttccagaaacgagaatattacttacaaaatgcgtttctcgttgcttacacaaagaaagccccccagctggccatcaccagaaaaatggcagccacagcagccacttgttgccaactcagtgaggacaaactattggcctgtggcgagggagcggctgacattattatcggacacttatgtatcagacatgaaaaccctggtgttggccagtgctgcacttcttcatatgccaacaggaggccatgcttcagcagcttggtggtggatgaaacatatgtccctcctgcattctctgatgacaagttcattttccataaggatctgtgccaagctcagggtgagcaaaagccacaaacagaggaacaacttgaggctgtcattgcagatttctcaggcctgttggagaaatgctgccaaggccaggaacaggaagtctgctttgctgaagagggacaaaaactttcaaaaactcgtgctgctttgggagttttga

SEQ ID NO: 427 - protein, 520 aa, Human [sequence omitted]

SEQ ID NO: 428 - DNA, 1563 bp, Human
atggaagtgggtggaatcaatttttttaattttcctactaaattttacatatggaatagcttccatattggattcttaccaatgtactgcagagataagtttagccctggctaccatattttttgcccagtttgttcaagaagccacttacaaggaagtaagcaaaatggtgaaagatgcattgactgcaatacagtcttcagggtgtttagaaaaccagctacctgcctttctggaagaactttgccagaaagaaattttggagaagtacggacattcagactgctgcagccaaagctgttttcttgcacacaaaaagcccactccagcatcgatcccacttttccaagttccagaacctgtcacaagctgagcataagaagacagggagacattcatgaacaaattcatttagatagcaagaaggcatcccttcctgtatgcacctacaattcttctttgggctgctcgctacaaaataattccatcttgctgcaaagcatgcttccaaacaaaggcagcaacagttacaaaagaattaagagaaagcagcttgttaaatcaacatgcatgtgcagtaatgaaaaattttgggacccgaactttccaagccataactgttacaatccagaaactagtcctggatgtggcccatgtacagcactgttgcagaggagatgtgctggattgtctgcaggatggggaaaaaatcatgtcctacatatgttctcaacaagacactctgtcaaacaaaataacagaatgctgcaaactgaccacgctggaacgtggtcaatgtataattcatgcagaaaaaggtctatctccaaatctaaacaggtttttaggagaccaattttcttcaggggaaaaaaatatcttcttggcaagttttgttcaatattcaagaagacatcctcagcttgctgtctcagtaattctaagagttgcaggataccaggagttattggagaagtgtttccagacaggagaagaagaattacagaaatacatccaggagagccaagcattggcaaagcgaagctgcggcctcttccagaaactaggagaatattacttacaaaatgcgtttctcgttgcttacacaaagaaagccccccagctgacctcgtcggagctgatggccatcaccagaaaaatggcagccacagcagccacttgttgccaactcagggacaaactattggcctgtggcgagggagcggccattattatcggacacttatgtatcagacaaatgactccagtaaaccctggtgttggccagtgctgcacttcttcatatgccaacaggaggccatgcttcagcagcttggtggtggaggatctgtgccaagctcagggtgtagcgctgcaaacgatgaagcaagagtttctcatccttgtgaagcaaaagccacaaataacagaggaacaactggctgtcattgcagatttctcaggcctgttggagaaatgctgccaaggccaggaacaggaagtctgctttgcagagggacaaaaactgatttcaaaaactcgtgctgctttgggagtttatga

SEQ ID NO: 429 - protein, 15 aa, Human
EVGGINFFNFPTKFY

SEQ ID NO: 430 - protein, 59 aa, Human
MRKKFWRSTDIQTAAAKVKREDITVFLHTKSPLQHRSHFSKFQNLSQAVKHMKKTGRHS

SEQ ID NO: 431 - protein, 14 aa, Human
MHLQFFFGLLAMTK

SEQ ID NO: 432 - protein, 16 aa, Human
MQLNASKQRQQQLQKN

SEQ ID NO: 433 - protein, 41 aa, Human
MLPNKGSNSYKRIKRKQLVKSTCMCSNEKFWDPNFPSHNCY

SEQ ID NO: 434 - protein, 38 aa, Human
MWPMYMSTVAEEMCWIVCRMGKKSCPTYVLNKTLCQTK

SEQ ID NO: 435 - protein, 31 aa, Human
MFSTRHSVKQNNRMLQTDHAGTWSMYNSCRK

SEQ ID NO: 436 - protein, 14 aa, Human
MQKMMKNLKVYLQI

SEQ ID NO: 437 - protein, 13 aa, Human
MNIQEDILSLLSQ

SEQ ID NO: 438 - protein, 13 aa, Human
MRFSLLTQRKPPS

SEQ ID NO: 439 - protein, 38 aa, Human
MPTGGHASAAWWWMKHMSLLHSLMTSSFSIRICAKLRV

SEQ ID NO: 440 - protein, 252 aa, Human [sequence omitted]

SEQ ID NO: 441 - DNA, 759 bp, Human
atgacaccgggcacccagtctcctttcttcctgctgctgctcctcacagtgcttacaggttctggtcatgcaagctctaccccaggtggagaaaaggagacttcggctacccagagaagttcagtgcccagctctactgagaagaatgcttttaattcctctctggaagatcccagcaccgactactaccaagagctgcagagagacatttctgaaatgtttttgcagatttataaacaagggggttttctgggcctctccaatattaagttcaggccaggatctgtggtggtacaattgactctggccttccgagaaggtaccatcaatgtccacgacatggagacacagttcaatcagtataaaacggaagcagcctctcgatataacctgacgatctcagacgtcagcgtgagtgatgtgccatttcctttctctgcccagtctggggctggggtgccaggctggggcatcgcgctgctggtgctggtctgtgttctggttgcgctggccattgtctatctcattgccttggctgtctgtcagtgccgccgaaagaactacgggcagctggacatctttccagcccgggatacctaccatcctatgagcgagtaccccacctaccacacccatgggcgctatgtgccccctagcagtaccgatcgtagcccctatgagaaggtttctgcaggtaatggtggcagcagcctctcttacacaaacccagcagtggcagccacttctgccaacttgtag

SEQ ID NO: 442 - protein, 242 aa, Human [sequence omitted]

SEQ ID NO: 443 - DNA, 729 bp, Human
atgcaccgggcacccagtctcctttcttcctgctgctgctcctcacagtgcttacaggttctggtcatgcaagctctaccccaggtggagaaaaggagacttcggctacccagagaagttcagtgcccagctctactgagaagaatgcttttaattcctctctggaagatcccagcaccgactactaccaagagctgcagagagacatttctgaaatgtttttgcagatttataaacaagggggttttctgggcctctccaatattaagttcaggccaggatctgtggtggtacaatctctggccttccgagaaggtaccatcaatgtccacgacatggagacacagttcaatcagtataaaacggaagcagcctctcgatataaccgtgatgtgccatttcctttctctgcccagtctggggctggggtgccaggctggggcatcgcgctgctggtgctggtctgtgttctggttgcgctggccattgtctatctcattgccttggctgtctgtcagtgccgccgaaagaactacgggcagctggacatctttccagcccgggatacctaccatcctagcgagtaccccacctaccacacccatgggcgctatgtgccccctagcagtaccgatcgtagcccctatgagaaggtttctgcaggtaatggtggcagcagcctctcttacacaaacccagcagtggcagccacttctgccaacttgttga

SEQ ID NO: 444 - protein, 213 aa, Human [sequence omitted]

SEQ ID NO: 445 - DNA, 642 bp, Human
atggacaccgggcacccagtctcctttcttcctgctgctgctcctcacagtgcttacaggttctggtcatgcaagctctaccccaggtggagaaaaggagacttcggctacccagagaagttcagtgcccagctctacttcctctctggaagatcccagcaccgactactaccaagagctgcagagagacatttcacaagggggttttctgggcctctccaatatgttcaggccaggatctgtggtggtacaattgactctggccttccgagaaggtaccatcaatgtccacgacatggagacacagttcaatcagtacctgacgatctcagacgtcagcgtgagtgtgccatttcctttctctgcccagtctggggctggggtgccaggctggggcatcgcgctgctggtgctggtctgtgttctggttgcgctggccattgtctatctcattgccttggctgtctgtcagtgccgccgaaagaactacgggcagctggacatctttccagcccgggatacctaccatcctatgagcgagtaccccacctaccacacccatgggcgctatgtgccccctggtggcagcagcctctcttacacaaacccagcagtggcagccacttctgccaacttgtatga

SEQ ID NO: 446 - protein, 45 aa, Human
DTGHPVSFLPAAAPHSAYRFWSCKLYPRWRKGDFGYPEKFSAQLY

SEQ ID NO: 447 - protein, 98 aa, Human
HRAPSLLSSCCCSSQCLQVLVMQALPQVEKRRLRLPREVQCPALLRRMLLIPLWKIPAPTTTKSCRETFLKCFCRFINKGVFWASPILSSGQDLWWYN

SEQ ID NO: 448 - protein, 21 aa, Human
MSTTWRHSSISIKRKQPLDIT

SEQ ID NO: 449 - protein, 63 aa, Human
MCHFLSLPSLGLGCQAGASRCWCWSVFWLRWPLSISLPWLSVSAAERTTGSWTSFQPGIPTIL

SEQ ID NO: 450 - protein, 41 aa, Human
MGAMCPLAVPIVAPMRRFLQVMVAAASLTQTQQWQPLLPTC

SEQ ID NO: 451 - protein, 509 aa, Human
MERRRLWGSIQSRYISMSVWTSPRRLVELAGQSLLKDEALAIAALELLPRELFPPLFMAAFDGRHSQTLKAMVQAWPFTCLPLGVLMKGQHLHLETFKAVLDGLDVLLAQEVRPRRWKLQVLDLRKNSHQDFWTVWSGNRASLYSFPEPEAAQPMTKKRKVDGLSTEAEQPFIPVEVLVDLFLKEGACDELFSYLIEKVKRKKNVLRLCCKKLKIFAMPMQDIKMILKMVQLDSIEDLEVTCTWKLPTLAKFSPYLGQMINLRRLLLSHIHASSYISPEKEEQYIAQFTSQFLSLQCLQALYVDSLFFLRGRLDQLLRHVMNPLETLSITNCRLSEGDVMHLSQSPSVSQLSVLSLSGVMLTDVSPEPLQALLERASATLQDLVFDECGITDDQLLALLPSLSHCSQLTTLSFYGNSISISALQSLLQHLIGLSNLTHVLYPVPLESYEDIHGTLHLERLAYLHARLRELLCELGRPSMVWLSANPCPHCGDRTFYDPEPILCPCFMPN

SEQ ID NO: 452 - DNA, 2148 bp, Human
gcttcagggtacagctcccccgcagccagaagccgggcctgcagcccctcagcaccgctccgggacaccccacccgcttcccaggcgtgacctgtcaacagcaacttcgcggtgtggtgaactctctgaggaaaaaccattttgattattactctcagacgtgcgtggcaacaagtgactgagacctagaaatccaagcgttggaggtcctgaggccagcctaagtcgcttcaaaatggaacgaaggcgtttgtggggttccattcagagccgatacatcagcatgagtgtgtggacaagcccacggagacttgtggagctggcagggcagagcctgctgaaggatgaggccctggccattgccgccctggagttgctgcccagggagctcttcccgccactcttcatggcagcctttgacgggagacacagccagaccctgaaggcaatggtgcaggcctggcccttcacctgcctccctctgggagtgctgatgaagggacaacatcttcacctggagaccttcaaagctgtgcttgatggacttgatgtgctccttgcccaggaggttcgccccaggaggtggaaacttcaagtgctggatttacggaagaactctcatcaggacttctggactgtatggtctggaaacagggccagtctgtactcatttccagagccagaagcagctcagcccatgacaaagaagcgaaaagtagatggtttgagcacagaggcagagcagcccttcattccagtagaggtgctcgtagacctgttcctcaaggaaggtgcctgtgatgaattgttctcctacctcattgagaaagtgaagcgaaagaaaaatgtactacgcctgtgctgtaagaagctgaagatttttgcaatgcccatgcaggatatcaagatgatcctgaaaatggtgcagctggactctattgaagatttggaagtgacttgtacctggaagctacccaccttggcgaaattttctccttacctgggccagatgattaatctgcgtagactcctcctctcccacatccatgcatcttcctacatttccccggagaaggaagagcagtatatcgcccagttcacctctcagttcctcagtctgcagtgcctgcaggctctctatgtggactctttatttttccttagaggccgcctggatcagttgctcaggcacgtgatgaaccccttggaaaccctctcaataactaactgccggctttcggaaggggatgtgatgcatctgtcccagagtcccagcgtcagtcagctaagtgtcctgagtctaagtggggtcatgctgaccgatgtaagtcccgagcccctccaagctctgctggagagagcctctgccaccctccaggacctggtctttgatgagtgtgggatcacggatgatcagctccttgccctcctgccttccctgagccactgctcccagcttacaaccttaagcttctacgggaattccatctccatatctgccttgcagagtctcctgcagcacctcatcgggctgagcaatctgacccacgtgctgtatcctgtccccctggagagttatgaggacatccatggtaccctccacctggagaggcttgcctatctgcatgccaggctcagggagttgctgtgtgagttggggcggcccagcatggtctggcttagtgccaacccctgtcctcactgtggggacagaaccttctatgacccggagcccatcctgtgcccctgtttcatgcctaactagctgggtgcacatatcaaatgcttcattctgcatacttggacactaaagccaggatgtgcatgcatcttgaagcaacaaagcagccacagtttcagacaaatgttcagtgtgagtgaggaaaacatgttcagtgaggaaaaaacattcagacaaatgttcagtgaggaaaaaaaggggaagttggggataggcagatgttgacttgaggagttaatgtgatctttggggagatacatcttatagagttagaaatagaatctgaatttctaaagggagattctggcttgggaagtacatgtaggagttaatccctgtgtagactgttgtaaagaaactgttgaaaataaagagaagcaatgtgaagcaaaaaaaaaaaaaaaaaa

SEQ ID NO: 453 - protein, 444 aa, Human [sequence omitted]

SEQ ID NO: 454 - DNA, 1335 bp, Human
atgtggaacgaaggcgtttgtggggttccattcagagccgatacatcagcagtgtgtggacaagcccacggagacttgtggagctggcagggcagagcctgcaggatgaggccctggccattgccgccctggagttgctgcccagggagctcttcccgccactcttcatggcagcctttgacgggagacacagccagacccaggcaatggtgcaggcctggcccttcacctgcctccctctgggagtgcagggacaacatcttcacctggagaccttcaaagctgtgcttgatggacttgatgtgctccttgcccaggaggttcgccccaggaggtggaaacttcaagtgctggatttacggaagaactctcatcaggacttctggactgtatggtctggaaacagggccagtctgtactcatttccagagccagaagcagctcagcccagcacagaggcagagcagcccttcattccagacctgttcctcaaggaaggtgcctgtgatgaattgttctcctacctcattgagaaagagcgaaagaaaaatgtactacgcctgtgctgtaagaagcagatttttgcaatgcccatgcaggatatcaagaaaatggtgcagctggactctattgaagatttggaagcttgtacctggaagctacccaccttggcgaaattttctccttacctgggccagattaatctgcgtagactcctcctctcccacatccatgcatcttcctacatttccccggagaaggaagagcagtatatcgcccagttcacctctcagttcctcagtctgcagtgcctgcaggctctctatgtggactctttatttttccttagaggccgcctggatcagttgctcaggcacgctaactgccggctttcggaaggggatgtgcatctgtcccagagtcccagcgtcagtcagcgtcccgagcccctccaagctctgctggagagagcctctgccaccctccaggacctggtctttgatgagtgtgggatcacggatgatcagctccttgccctcctgccttcccgcttctacgggaattccatctccatatctgccttgcagagtctcctgcagcacctcatcgggccccacgtgctgtatcctgtccccctggagagttatgaggacatccatggtaccctccacctggagaggcttgcctatctgcatgccaggctcagggagttgctgtgtgagttggggcggcccagcatggtctggcttagtgccaacccctgtcctcactgtggggacagaaccttctatgacccggagcccatcctgtgcccctgtttcatgcctaacttga

SEQ ID NO: 455 - protein, 473 aa, Human [sequence omitted]

SEQ ID NO: 456 - DNA, 1422 bp, Human
atgggaacgaaggcgtttgtggggttccattcagagccgatacatcagcatgagtgtgtggacaagcccacggagacttgtggagctggcagggcagagcctgctgaaggaggccctggccattgccgccctggagttgctgcccagggagctcttcccgccactcttcatggcagccttcgggagacacagccagaccctgaaggcaatggtgcaggcctggcccttcacctgcctccctctgggagtgctgatgaagggacaacatcttcacctggagaccttcaaagctgtgcttgtgctccttgcccaggaggttcgccccaggaggtggaaacttcaagtgctggatttacggaagaactctcatcaggacttctggactgtatggtctggaaacagggccagtctgtactcatttccagagccagaagcagctcagcccatgacaaagaagcgaaaagtagatggtttgagcacagaggcagagcagcccttcattccagtagaggtgctcgtagacctgttcctcaaggaaggtgcctggaaagtgaagcgaaagaaaaatgtactacgcctgtgctggaagctgaagatttttgcaatgcccatgcaggatatcaagatgatcctgaaaatggtgcagctggactctatagatttggaagtgacttgtacctggaagctacccaccttggcgaaattttctccttacctgggccagatgatactcctcctctcccacatccatgcatcttcctacatttccccggagaaggaagagcagtatatcgcccagttcacctctcagttcctcagtctgcagtgcctgcaggctctctatgtggactctttatttttcctaggccgcctggatcagttgctcaggcacgtgatgaaccccttggaaaccctctcaataacctgccggctttcggaaggggatgtgatgcatctgtcccagagtcccagcgtcagtcagctaagtgtcctgagtctaagtggggtcatgctgaccgatgtaagtcccgagcccctccaagctctgctggagagagcctctgccaccctccaggacctggtctttcagctccttgccctcctgccttccctgagccactgctcccagcttacaaccttaagcttctacgggaattccatctccatatctgccttgcagagtctcctgcagcacctcatcgggctgagcaatctgacccacgtgctgtatcctgtccccctggagagttaggacatccatggtaccctccacctggagaggcttgcctatctgcatgccaggctcagggagttgctgtggttggggcggcccagcatggtctggcttgccaacccctgtcctcactgtggggacagaaccttctacccggagcccatcctgtgcccctgtttcatgcctga

SEQ ID NO: 457 - protein, 16 aa, Human
WNEGVCGVPFRADTSA

SEQ ID NO: 458 - protein, 36 aa, Human
GTKAFVGFHSEPIHQHECVDKPTETCGAGRAEPAEG

SEQ ID NO: 459 - protein, 32 aa, Human
MRPWPLPPWSCCPGSSSRHSSWQPLTGDTARP

SEQ ID NO: 460 - protein, 53 aa, Human
MDLMCSLPRRFAPGGGNFKCWIYGRTLIRTSGLYGLETGPVCTHFQSQKQLSP

SEQ ID NO: 461 - protein, 53 aa, Human
MVWKQGQSVLISRARSSSAHDKEAKSRWFEHRGRAALHSSRGARRPVPQGRCL

SEQ ID NO: 462 - protein, 10 aa, Human
MNCSPTSLRK

SEQ ID NO: 463 - protein, 9 aa, Human
MYYACAVRS

SEQ ID NO: 464 - protein, 49 aa, Human
MHLPTFPRRRKSSISPSSPLSSSVCSACRLSMWTLYFSLEAAWISCSGT

SEQ ID NO: 465 - protein, 16 aa, Human
MSVGSRMISSLPSCLP

SEQ ID NO: 466 - protein, 62 aa, Human
MRTSMVPSTWRGLPICMPGSGSCCVSWGGPAWSGLVPTPVLTVGTEPSMTRSPSCAPVSCLT

SEQ ID NO: 467 - protein, 983 aa, Human
MDCQLSILLLLSCSVLDSFGELIPQPSNEVNLLDSKTIQGELGWISYPSHGWEEISGVDEHYTPIRTYQVCNVMDHSQNNWLRTNWVPRNSAQKIYVELKFTLRDCNSIPLVLGTCKETFNLYYMESDDDHGVKFREHQFTKIDTIAADESFTQMDLGDRILKLNTEIREVGPVNKKGFYLAFQDVGACVALVSVRVYFKKCPFTVKNLAMFPDTVPMDSQSLVEVRGSCVNNSKEEDPPRMYCSTEGEWLVPIGKCSCNAGYEERGFMCQACRPGFYKALDGNMKCAKCPPHSSTQEDGSMNCRCENNYFRADKDPPSMACTRPPSSPRNVISNINETSVILDWSWPLDTGGRKDVTFNIICKKCGWNIKQCEPCSPNVRFLPRQFGLTNTTVTVTDLLAHTNYTFEIDAVNGVSELSSPPRQFAAVSITTNQAAPSPVLTIKKDRTSRNSISLSWQEPEHPNGIILDYEVKYYEKQEQETSYTILRARGTNVTISSLKPDTIYVFQIRARTAAGYGTNSRKFEFETSPDSFSISGESSQVVMIAISAAVAIILLTVVIYVLIGRFCGYKSKHGADEKRLHFGNGHLKLPGLRTYVDPHTYEDPTQAVHEFAKELDATNISIDKVVGAGEFGEVCSGRLKLPSKKEISVAIKTLKVGYTEKQRRDFLGEASIMGQFDHPNIIRLEGVVTKSKPVMIVTEYMENGSLDSFLRKHDAQFTVIQLVGMLRGIASGMKYLSDMGYVHRDLAARNILINSNLVCKVSDFGLSRVLEDDPEAAYTTRGGKIPIRWTSPEAIAYRKFTSASDVWSYGIVLWEVMSYGERPYWEMSNQDVIKAVDEGYRLPPPMDCPAALYQLMLDCWQKDRNNRPKFEQIVSILDKLIRNPGSLKIITSAAARPSNLLLDQSNVDITTFRTTGDWLNGVWTAHCKEIFTGVEYSSCDTIAKISTDDMKKVGVTVVGPQKKIISSIKALETQSKNGPVPV

SEQ ID NO: 468 - DNA, 5799 bp, Human
cccgctctgcttcagcgcacgctgaagacggcactaggacccagggaagtccccgagcggggttcgcggaaaggcagccagactcctccttatctccagtgtcaaacttgacatcagcctgcgagcggagcatggtaacttctccagcaatcagagcgctccccctcacatcagtggcatgcttcatggagatatgctcctctcactgccctctgcaccagcaacatggattgtcagctctccatcctcctccttctcagctgctctgttctcgacagcttcggggaactgattccgcagccttccaatgaagtcaatctactggattcaaaaacaattcaaggggagctgggctggatctcttatccatcacatgggtgggaagagatcagtggtgtggatgaacattacacacccatcaggacttaccaggtgtgcaatgtcatggaccacagtcaaaacaattggctgagaacaaactgggtccccaggaactcagctcagaagatttatgtggagctcaagttcactctacgagactgcaatagcattccattggttttaggaacttgcaaggagacattcaacctgtactacatggagtctgatgatgatcatggggtgaaatttcgagagcatcagtttacaaagattgacaccattgcagctgatgaaagtttcactcaaatggatcttggggaccgtattctgaagctcaacactgagattagagaagtaggtcctgtcaacaagaagggattttatttggcatttcaagatgttggtgcttgtgttgccttggtgtctgtgagagtatacttcaaaaagtgcccatttacagtgaagaatctggctatgtttccagacacggtacccatggactcccagtccctggtggaggttagagggtcttgtgtcaacaattctaaggaggaagatcctccaaggatgtactgcagtacagaaggcgaatggcttgtacccattggcaagtgttcctgcaatgctggctatgaagaaagaggttttatgtgccaagcttgtcgaccaggtttctacaaggcattggatggtaatatgaagtgtgctaagtgcccgcctcacagttctactcaggaagatggttcaatgaactgcaggtgtgagaataattacttccgggcagacaaagaccctccatccatggcttgtacccgacctccatcttcaccaagaaatgttatctctaatataaacgagacctcagttatcctggactggagttggcccctggacacaggaggccggaaagatgttaccttcaacatcatatgtaaaaaatgtgggtggaatataaaacagtgtgagccatgcagcccaaatgtccgcttcctccctcgacagtttggactcaccaacaccacggtgacagtgacagaccttctggcacatactaactacacctttgagattgatgccgttaatggggtgtcagagctgagctccccaccaagacagtttgctgcggtcagcatcacaactaatcaggctgctccatcacctgtcctgacgattaagaaagatcggacctccagaaatagcatctctttgtcctggcaagaacctgaacatcctaatgggatcatattggactacgaggtcaaatactatgaaaagcaggaacaagaaacaagttataccattctgagggcaagaggcacaaatgttaccatcagtagcctcaagcctgacactatatacgtattccaaatccgagcccgaacagccgctggatatgggacgaacagccgcaagtttgagtttgaaactagtccagactctttctccatctctggtgaaagtagccaagtggtcatgatcgccatttcagcggcagtagcaattattctcctcactgttgtcatctatgttttgattgggaggttctgtggctataagtcaaaacatggggcagatgaaaaaagacttcattttggcaatgggcatttaaaacttccaggtctcaggacttatgttgacccacatacatatgaagaccctacccaagctgttcatgagtttgccaaggaattggatgccaccaacatatccattgataaagttgttggagcaggtgaatttggagaggtgtgcagtggtcgcttaaaacttccttcaaaaaaagagatttcagtggccattaagaccctgaaagttggctacacagaaaagcagaggagagacttcctgggagaagcaagcattatgggacagtttgaccaccccaatatcattcgactggaaggagttgttaccaaaagtaagccagttatgattgtcacagaatacatggagaatggttccttggatagtttcctacgtaaacacgatgcccagtttactgtcattcagctagtggggatgcttcgagggatagcatctggcatgaagtacctgtcagacatgggctatgttcaccgagacctcgctgctcggaacatcttgatcaacagtaacttggtgtgtaaggtttctgatttcggactttcgcgtgtcctggaggatgacccagaagctgcttatacaacaagaggagggaagatcccaatcaggtggacatcaccagaagctatagcctaccgcaagttcacgtcagccagcgatgtatggagttatgggattgttctctgggaggtgatgtcttatggagagagaccatactgggagatgtccaatcaggatgtaattaaagctgtagatgagggctatcgactgccaccccccatggactgcccagctgccttgtatcagctgatgctggactgctggcagaaagacaggaacaacagacccaagtttgagcagattgttagtattctggacaagcttatccggaatcccggcagcctgaagatcatcaccagtgcagccgcaaggccatcaaaccttcttctggaccaaagcaatgtggatatcactaccttccgcacaacaggtgactggcttaatggtgtctggacagcacactgcaaggaaatcttcacgggtgtggagtacagttcttgtgacacaatagccaagatttccacagatgacatgaaaaaggttggtgtcaccgtggttgggccacagaagaagatcatcagtagcattaaagctctagaaacgcaatcaaagaatggcccagttcccgtgtaaagcacgggacggaagtgcttctggacggaagtggtggctgtggaaggcgtagcatcatcctgcagacagacaataattctggagatactggtggaagttccaagtccaataagacactcaaatatgagtacaaatgccttaaaatggaattgaaaaactctttattttcccctatcatttattggatgggtgggtggggtatttttttgtaattgcttttttaaatattagttaatggattaaatttaattcttcagcgtaaaatggtgaagaactagcatatagccattgatcataaactgactatcataaaatcaaaacaagtgaaataacaaaatggacatggtggctttgtttaggtagagccacaaaagaaaagacttgtaatatttttatatacagaggaaatctgtaacaggtattttgtttcttttaaagcaagcaacacagaggaatttatacctcaaactatctggccatatttactaccttatcactgcattattctcttttatctgtttaaagcatatagagatgaagtttgtagttgttttaagtactacacatttttaaattgttagcttccttaagtatatcatgtaaagaaatgtcttaatttttgaaaaaagtacatatttattttcttttgaattgtttttattgttttctatttatgccttgatgatttaatatggatttgttacagccaagtgccaaatgctctctcaaattgtcagcaatttaactagacacagataataatgggtttctttcagattttttgaaccatccacttacatatatttttaaaaaatgaaatccttttcctgttcatacactaaccaaatctctcaaatctgttatcccaatcattgttgcctctccgtttattataaactgtatgctcacaacttagtgtaatataccagcttgtatgcaatggattttcaaccagataacatacctttcctgctctggtgcttagagactatcaactccctcctttagtgaaggagccgtgttagagcttccgagaatagctccactggagagaagtggaatcctatatagaatgctgcactaattgacaacacagcctataggccaatgcatgagtaaaaaaaaaaacaattactggctcactggctttgaaaagtcacttactattgttgctgaaacttgctgagctgtttatagagaatgatgataacagaacttttcctctgtatcactggtgtttaggtgaattaattaaacattgtgatcattagtaccaggtattattatctttaagagtcttccacttcaatgcacatggtgcagttttggtgtgtaacttagaaggattgaacttctttgaatttactggacataacattttcagaatagttggtcatctagcaaccgcctcaaaatgtgtaagcaggagagaaatttctcatcacagggatttagacttactattacataaaggctaactatgagcttgctcattaattttgaaaagatgtacctggtggatatctagctagtaatatattctgaagcaacattttagctctattgatactctttctaatgctgatatgatcttgagtataagaaatgcatatgtcactagaatggataaaataatgctgcaaacttaatgttcttatgcaaaatggaacgctaatgaaacacagcttacaatcgcaaatcaaaactcacaagtgctcatctgttgtagatttagtgtaataagacttagattgtgctccttcggatatgattgtttctcaaatcttggcaatattccttagtcaaatcaggctactagaattctgtattggatatataagagcatgaaatttttaaaaatacacttgtgattataaaattaatcacaaatttcacttatacctgctatcagcagctagaaaacattttttttttaaatcaagtattttgtgtttggaatgttagaatgagatctgaatgtggtttcaatctaattttttcccagactactatttctttttaggtattattctgagcatactcaacaaaacccatgcatttcataaactaatagaagttgaggattgttgaatctatttcacttattttggctgtggtttccatctgaaagtagaggttgtatacaccatatactgttcttcattttattaatatttttctccttgacctctcataaatttactttacacaattcttaccctgtacatatgtaaacataagtgtacgattcttaaccatggagtagaggtactagaatgcttacggccatctctttgtacaggaactgcattgactttcagtaaacataaagccacaactcctacatgatgttatgtaccatatgatctgttttgtatcttaaatttgatttacatatattatttatttctggtaactcactcagtttatgctgtgctaaatatcaatcaagccatgtataaatgtgatatgattggcaatatgtgtttatgttgtacaatgtaaatggcctcttactaatgtaaaatgatttgtagtggaaacatttatatttttataataaacataatgaaaatattttttacagattggaaaaaaaaaaaaaaaaaaaaaaaaaaaaaa

SEQ ID NO: 469 - protein, 930 aa, Human [sequence omitted]

SEQ ID NO: 470 - DNA, 2793 bp, Human
atgtggattgtcagctctccatcctcctccttctcagctgctctgttctcgacagcttcggggaacttccgcagccttccaatgaagtcaatctactggattcaaaaacaattcaaggggagctgggctggatctcttatccatcacatgggtgggaagagatcagtggtgtggatgaacattacacacccatcaggacttaccaggtgtgcaatgtcatggaccacagtcaaaacaattggcgaacaaactgggtccccaggaactcagctcagaagatttatgtggagctcaagttcactctacgagactgcaatagcattccattggtttgaacttgcaaggagacattcaacctgtactacatggagtctgatgatgatcatggggaatttcgagagcatcagtttacaaagattgacaccattgcagctgatgaaagtttcactcaaatggatcttggggaccgtattcagctcaacactgagattagagaaggtcctgtcaacaagaagggattttatttggcatttcaagatgttggtgcttgtgttgccttggtgtctggagtatacttcaaaaagtgcccatttacagagaatctggctatgtttccagacacggtacccatggactcccagtccctggtggaggttagagggtcttgtgtcaacaattctaaggaggaagatcctccaaggatgtactgcagtacagaaggcgaatggcttgtacccattggcaagtgttcctgcaatgctggctatgaagaaagaggttttatgtgccaagcttgtcgaccaggtttctacaaggcattggatggtaataagtgtgctaagtgcccgcctcacagttctactcaggaagatggttcaaactgcaggtgtgagaataattacttccgggcagacaaagaccctccatccatggcttgtacccgacctccatcttcaccaagaaatgttatctctaataacgagacctcagttatcctggactggagttggcccctggacacaggaggccggaaagatgttaccttcaacatcatatgtaaaaaatgtgggtggaataaacagtgtgagccatgcagcccaaatgtccgcttcctccctcgacagtttggactcaccaacaccacggcagaccttctggcacatactaactacacctttgagattgatgccgttaatggggtgtcagagcgctccccaccaagacagtttgctgcggtcagcatcacaactaatcaggctgctccatcacctgtcccgattaagaaagatcggacctccagaaatagcatctctttgtcctggcaagaacctgaacatcctaatgggatcatattggactacgaggtcaaatactatgaaaagcaggaacaagaaacaagttataccattcgggcaagaggcacaaatgttaccatcagtagcctcaagcctgacactatatacgtattccaaatccgagcccgaacagccgctggatatgggacgaacagccgcaagtttgagtttgaaactagtccagactctttctccatctctggtgaaagtagccaagtggtcatcgccatttcagcggcagcaattattctcctcactgttgtcatctatgtttttgggaggttctgtggctataagtcaaaacatggggcagatgaaaaaagacttcattttggcaatgggcattaacttccaggtctcaggacttatgttgacccacatacatatgaagaccctacccaagctgttcatgagtttgccaaggaattggatgccaccaacatatccattgataaagttgttggagcaggtgaatttggagaggtgtgcagtggtcgctaacttccttcaaaaaaagagatttcagtggccattaagacccaagttggctacacagaaaagcagaggagagacttcctgggagaagcaagcattatgggacagtttgaccaccccaatatcattcgactggaaggagttgttaccaaaagtaagccagttattgtcacagaatacatggagaatggttccttggatagtttcctacgtaaacacgatgcccagtttactgtcattcagcagtacctgtcagacatgggctatgttcaccgagacctcgctgctcggaacatcttcaacagtaacttggtgtgtaaggtttctgatttcggactttcgcgtgtcctggaggatgacccagaagctgcttatacaacaagaggagggaagatcccaatcaggtggacatcaccagaagctacctaccgcaagttcacgtcagccagcgatgtatggagttatgggattgttctctgggaggtgtcttatggagagagaccatactgggagatgtccaatcaggatgttaaagctgatgagggctatcgactgccaccccccatggactgcccagctgccttgtatcagctgctggactgctggcagaaagacaggaacaacagacccaagtttgagcagattgttagtattctggacaagcttatccggaatcccggcagccagatcatcaccagtgcagccgcaaggccatcaaaccttcttctggaccaaagcaatgtggatatcactaccttccgcacaacaggtgactggcttaatggtgtctggacagcacactgcaaggaaatcttcacgggtgtggagtacagttcttgtgacacaaaaaaggttggtgtcaccgtggttgggccacagaagaagatcatcagtagcattaaagctcaaacgcaatcaaagaatggcccagttcccgtgttga

SEQ ID NO: 471 - protein, 818 aa, Human [sequence omitted]

SEQ ID NO: 472 - DNA, 2457 bp, Human
atgggattgtcagctctccatcctcctccttctcagctgctctgttctcgacagcttcggggaactgattccgcagccttccaaagtcaatctactggattcaaaaacaattcaaggggagctgggctggatctcttatccatcacatgggtgggaagagatcagtggtgtggaacattacacacccatcaggacttaccaggtgtgcaatgtcatggaccacagtcaaaacaattggctgagaacaaactgggtccccaggaactcagctcagaagatttatgtggagctcaagttcactctacgagactgcaacattccattggttttaggaacttgcaaggagacattcaacctgtactacatggagtctcatggggtgaaatttcgagagcatcagtttacaaagataagtttcactcaaatggatcttggggaccgtattctgaagctcaacacagaagtaggtcctgtcaacaagaagggattttatttggcatttcaagatgttggtgcttgtgttgccttggtgtctgtgagagtatacttcaaaaagtgcccatttacagtgaagaatctggctatgtttccagacacggtacccatggactcccagtccctggtggaggtggaggaagatcctccaaggatgtactgcagtacagaaggcgaatggcttgtacccattggcaagtgttcctgcaatgctggctaagaaagaggttttatgtgccaagcttgtcgaccaggtttctacaaggcattggatgggtgcccgcctcacagttctactcaggaagatggttcaatgaactgcaggtgttacttccgggcagacaaagaccctccatccatggcttgtacccgacctccatcttcaccaagaaatgttatctctataaacgagacctcagttatcctggactggagttggcccctggacacaggaggccggaaagatgttaccttcaacatcatatgaaaatgtgggtggaatataaaacagtggccatgcagcccaaatgtccgcttcctccctcgacagtttggactcaccaacaccacggtgacagtgacagaccttctggcacatactggggtgtcagagctgagctccccaccaagacagtttgctgcggtcagcatcacaactcaggctgctccatcacctgtcctgacgattgggatcatattggactacgaggtcaaatactaaaagcaggaacaagaaacaagttataccattctgagggcaagaggcacaaatgttaccatcagcactatatacgtattccaaatccgagcccgaacagccgctggatatgggacgaacagccgcaagttccaagtggtcatgatcgccatttcagcggcagtagcaattattctcctcactgttgtcatctatgttttgattgggaggttctgtggctaaaaaagacttcattttggcaatgggcatttaaaacttccaggtctcaggacttatgtgtttgccaaggaattggatgccaccaacatatccatatttggagaggtgtgcagtggtcgcttaaaacttccttcaaaaaaagagatttcagtggccatgaccctgaaagttggctacacagaaaagcagaggagagacttcctgggagaagcaagcattatgggacagttccaccccaatatcattcgactggaaggagttgttaccaaaaggccagttatgattgtcacagaatacatggagaatggttccttggaacacgatgcccagtttactgtcattcagctagtggggatgcttcgagggatagcatctggcatgaagtacctgtcagacatgggctatgttcaccgagacctcgctgctcggaacatcttgatcaacagtttcggactttcgcgtgtcctggaggacccagaagctgcttatacaacaagaggagggaagatcccaatcaggtggacatcaccagaagctatagcctaccgcaagttcacgtcagccagcgatgtatggagttatgggattgttctctgggaggtgatgtcttatggagagagaccatactgggagatgtccaatcaggatgtaatgggctatcgactgccaccccccatggactgcccagctgccttgtatcagctgatgctggactgctggcagaaagacaggaacaacagacccaagtttattctggacaagcttatccggaatcccggcagcctgaagatcatcaccagtgcagccgcaaggccatcaaaccttcttctggaccaaagcaatgtggatatcactaccttccgcacaacaggtggtgtctggacagcacactgcaaggaaatcttcacgggtgtggagtacagttcttgcatgaaaaaggttggtgtcaccgtggttgggccacagaagaagatcatcagagctctagaaacgcaatcaaagaatggcccagttcccgtgtatga

SEQ ID NO: 473 - protein, 21 aa, Human
WIVSSPSSSFSAALFSTASGN

SEQ ID NO: 474 - protein, 27 aa, Human
GLSALHPPPSQLLCSRQLRGTDSAAFQ

SEQ ID NO: 475 - protein, 17 aa, Human
MWSSSSLYETAIAFHWF

SEQ ID NO: 476 - protein, 13 aa, Human
MKVSLKWILGTVF

SEQ ID NO: 477 - protein, 10 aa, Human
MLVLVLPWCL

SEQ ID NO: 478 - protein, 14 aa, Human
MACTHWQVFLQCWL

SEQ ID NO: 479 - protein, 25 aa, Human
MLAMKKEVLCAKLVDQVSTRHWMVI

SEQ ID NO: 480 - protein, 14 aa, Human
MLPSTSYVKNVGGI

SEQ ID NO: 481 - protein, 28 aa, Human
MQPKCPLPPSTVWTHQHHGDSDRPSGTY

SEQ ID NO: 482 - protein, 15 aa, Human
MSASSLDSLDSPTPR

SEQ ID NO: 483 - protein, 23 aa, Human
MGSYWTTRSNTMKSRNKKQVIPF

SEQ ID NO: 484 - protein, 51 aa, Human [sequence omitted]

SEQ ID NO: 485 - protein, 14 aa, Human
MGQMKKDFILAMGI

SEQ ID NO: 486 - protein, 44 aa, Human
MLTHIHMKTLPKLFMSLPRNWMPPTYPLIKLLEQVNLERCAVVA

SEQ ID NO: 487 - protein, 19 aa, Human
MVPWIVSYVNTMPSLLSFS

SEQ ID NO: 488 - protein, 11 aa, Human
MFTETSLLGTS

SEQ ID NO: 489 - protein, 23 aa, Human
MTQKLLIQQEEGRSQSGGHHQKL

SEQ ID NO: 490 - protein, 11 aa, Human
MYGVMGLFSGR

SEQ ID NO: 491 - protein, 27 aa, Human
MELWDCSLGGDVLWRETILGDVQSGCN

SEQ ID NO: 492 - protein, 13 aa, Human
MERDHTGRCPIRM

SEQ ID NO: 493 - protein, 18 aa, Human
MRAIDCHPPWTAQLPCIS

SEQ ID NO: 494 - protein, 36 aa, Human
MWISLPSAQQVTGLMVSGQHTARKSSRVWSTVLVTQ

SEQ ID NO: 495 - protein, 163 aa, Human
MADEEKLPPGWEKRMSRSSGRVYYFNHITNASQWERPSGNSSSGGKNGQGEPARVRCSHLLVKHSQSRRPSSWRQEKITRTKEEALELINGYIQKIKSGEEDFESLASQFSDCSSAKARGDLGAFSRGQMQKPFEDASFALRTGEMSGPVFTDSGIHIILRTE

SEQ ID NO: 496 - DNA, 994 bp, Human
tgctggccagcacctcgagggaagatggcggacgaggagaagctgccgcccggctgggagaagcgcatgagccgcagctcaggccgagtgtactacttcaaccacatcactaacgccagccagtgggagcggcccagcggcaacagcagcagtggtggcaaaaacgggcagggggagcctgccagggtccgctgctcgcacctgctggtgaagcacagccagtcacggcggccctcgtcctggcggcaggagaagatcacccggaccaaggaggaggccctggagctgatcaacggctacatccagaagatcaagtcgggagaggaggactttgagtctctggcctcacagttcagcgactgcagctcagccaaggccaggggagacctgggtgccttcagcagaggtcagatgcagaagccatttgaagacgcctcgtttgcgctgcggacgggggagatgagcgggcccgtgttcacggattccggcatccacatcatcctccgcactgagtgagggtggggagcccaggcctggcctcggggcagggcagggcggctaggccggccagctcccccttgcccgccagccagtggccgaaccccccactccctgccaccgtcacacagtatttattgttcccacaatggctgggagggggcccttccagattgggggccctggggtccccactccctgtccatccccagttggggctgcgaccgccagattctcccttaaggaattgacttcagcaggggtgggaggctcccagacccagggcagtgtggtgggaggggtgttccaaagagaaggcctggtcagcagagccgccccgtgtccccccaggtgctggaggcagactcgagggccgaattgtttctagttaggccacgctcctctgttcagtcgcaaaggtgaacactcatgcggcagccatgggccctctgagcaactgtgcagaccctttcacccccaattaaacccagaacca

SEQ ID NO: 497 - protein, 160 aa, Human
MWRTRRSCRPAGRSAAAAQAECTTSTTSLTPASGSGPAATAAVVAKTGRGSLPGSAARTCWSTASHGGPRPGGRRRSPGPRRRPWSSTATSRRSSRERRTLSLWPHSSATAAQPRPGETWVPSAEVRCRSHLKTPRLRCGRGRAGPCSRIPASTSSSALS

SEQ ID NO: 498 - DNA, 483 bp, Human
atgtggcggacgaggagaagctgccgcccggctgggagaagcgcagccgcagctcaggccgagtgtactacttcaaccacatcactaacgccagccagtgggagcggcccagcggcaacagcagcagtggtggcaaaaacgggcagggggagcctgccagggtccgctgctcgcacctgctggagcacagccagtcacggcggccctcgtcctggcggcaggagaagatcacccggaccaaggaggaggccctggagctcaacggctacatccagaagatcaagtcgggagaggaggactttgagtctctggcctcacagttcagcgactgcagctcagccaaggccaggggagacctgggtgccttcagcagaggtcagatgcagaagccatttgaagacgcctcgtttgcgctgcggacgggggagagcgggcccgtgttcacggattccggcatccacatcatcctccgcactgagttga

SEQ ID NO: 499 - protein, 159 aa, Human [sequence omitted]

SEQ ID NO: 500 - DNA, 480 bp, Human
atgggcggacgaggagaagctgccgcccggctgggagaagcgcatgagccgcagctcaggccgagtgtactacttcaaccacatcaccgccagccagtgggagcggcccagcggcaacagcagcagtggtggcaaaaacgggcagggggagcctgccagggtccgctgctcgcacctgctggtgaagcacagccagtcacggcggccctcgtcctggcggcaggagaagatcacccggaccaaggaggaggccctggagctgatcaacggctacatccagaagatcaagtcgggagaggaggacttgtctctggcctcacagttcagcgactgcagctcagccaaggccaggggagacctgggtgccttcagcagaggtcagatgcagaagccattagacgcctcgtttgcgctgcggacgggggagatgagcgggcccgtgttcacggattccggcatccacatcatcctccgcactga

SEQ ID NO: 501 - protein, 15 aa, Human
MWRTRRSCRPAGRSA

SEQ ID NO: 502 - protein, 29 aa, Human
MGGRGEAAARLGEAHEPQLRPSVLLQPHH

SEQ ID NO: 503 - protein, 179 aa, Human
MLNVSGLFVLLCGLLVSSSAQEVLAGVSSQLLNDLTQGLLRADFLPSLQTTGLQKPLSSAFDGVSGLLDIFGPPLTNEINTVSIQVKNPQLLHVSIESTPQRKEATVQVPFTSELIVQLLTMKPFTANMQSDIKVQIRLEKNVGGRYELAFGNCRLLPEAIWIQTGVQLAPAQNLLWQT

SEQ ID NO: 504 - DNA, 1280 bp, Human
ggccagagtgtcttgacagcacaccagagaaatccagggacctgaccgaagatgctgaatgtctccggcctctttgttctcctctgtgggctgcttgtctcatcctctgcacaggaggtcctggctggagtttcttcccagctccttaatgatttgactcaaggactcctcagggcagactttcttcccagcctgcagacaactggcctccagaaaccattgagtagtgccttcgatggtgtatcaggcctcctggacatctttggacctccactcaccaatgagatcaacactgttagcatacaggtgaaaaatcctcaactcctccatgtctccatcgagagcacccctcaaagaaaggaggccactgtacaagtaccattcacgtctgagttgattgtgcagctcctgaccatgaagcccttcacagctaatatgcagtcagatataaaagtccagattcgtttggagaagaatgtaggtggcagatatgagcttgcctttgggaactgcaggctcttgcccgaggctatttggatccaaactggagtccaactcgccccagcgcaaaatttgttgtggcaaacatagagagaaacctgaaaaacatagtagcccatgatctgggacgaaaagtgtgccctgtgattaataaatggctctacaacctggaccagcatgtggttaaagagttgattaatctggtcctgctgcaggaaaagtaccaagtcaccatctaaatgtccccaaagtgaagaagctatgtgtgtatcaatccgaatcagcttctgcatcctagtctcctccctggaatgtcctccacactccaggacaccacctgcgtagatcgtgttgattattcagctgatgcctggaattgcatgacccaccctggaccaaaagagcccctgcttctccgggtatggaggttatttccctgtaaatcctcaccagaacccatgtgctgattccctgtaatcttcccacaataaatttttagcagctctgaactgcaaactgtccagcttccacagcgccatgtggatgggggcaacgtggccagagatgatggtgggtctggtcatgataacaaaagtatgaaaagcaggggaggatacttgggttgatttatccattatctcataaacatctgaacactctggtatgatgtttcccaaaggctaattaaaattttaaaaaggtgaaaaaaaaaaaaaaaaaaaaaaaaaaaaaaaaaaaaaaaaaaaaaaaaaaaaaaaaaaaaaaaaaaaaaaaaaaaa

SEQ ID NO: 505 - protein, 164 aa, Human
MSPASLFSSVGCLSHPLHRRSWLEFLPSSLMILKDSSGQTFFPACRQLASRNHVVPSMVYQASWTSLDLHSPMRSTLLAYRKILNSSMSPSRAPLKERRPLYKYHSRLSSPSQLICSQIKSRFVWRRMVADMSLPLGTAGSCPRLFGSKLESNSPQRKICCGKH

SEQ ID NO: 506 - DNA, 495 bp, Human
atgtctccggcctctttgttctcctctgtgggctgcttgtctcatcctctgcacaggaggtcctggctggagtttcttcccagctccttaatgattctcaaggactcctcagggcagactttcttcccagcctgcagacaactggcctccagaaaccatgtagtgccttcgatggtgtatcaggcctcctggacatctttggacctccactcaccaatgagatcaacactgttagcatacaggaaaatcctcaactcctccatgtctccatcgagagcacccctcaaagaaaggaggccactgtacaagtaccattcacgtctgagtagcccttcacagctaatatgcagtcagataaagtccagattcgtttggagaagaatggtggcagatatgagcttgcctttgggaactgcaggctcttgcccgaggctatttggatccaaactggagtccaactcgccccagcgcaaaatttgttgtggcaaacattga

SEQ ID NO: 507 - protein, 172 aa, Human [sequence omitted]

SEQ ID NO: 508 - DNA, 519 bp, Human
atggctgaatgtctccggcctctttgttctcctctgtgggctgcttgtctcatcctctgcacaggaggtcctggctggagtttcttcccagctccttttgactcaaggactcctcagggcagactttcttcccagcctgcagacaactggcctccagaaaccattgagtgccttcgatggtgtatcaggcctcctggacatctttggacctccactcaccaagatcaacactgtcatacaggtgaaaaatcctcaactcctccatgtctccatcgagagcacccctcaaagaaaggaggccactgtacaagtaccattcacgtcgttgattgtgcagctcctgaccatgaagcccttcacagctatgcagtcagatataaaagtccagattcgtttggagaagaatgtaggtggcagatagcttgcctttgggaactgcaggctcttgcccgaggctatttggatccaaactggagtccaactcgccccagcgcaaaatttgttgtggcaaacatatga

SEQ ID NO: 509 - protein, 31 aa, Human
AECLRPLCSPLWAACLILCTGGPGWSFFPAP

SEQ ID NO: 510 - protein, 32 aa, Human
MSPASLFSSVGCLSHPLHRRSWLEFLPSSLMI

SEQ ID NO: 511 - protein, 24 aa, Human
MVYQASWTSLDLHSPMRSTLLAYR

SEQ ID NO: 512 - protein, 22 aa, Human
MSPSRAPLKERRPLYKYHSRLS

SEQ ID NO: 513 - protein, 33 aa, Human
MSLPLGTAGSCPRLFGSKLESNSPQRKICCGKH

SEQ ID NO: 514 - protein, 123 aa, Human
MKAVLLALLMAGLALQPGTALLCYSCKAQVSNEDCLQVENCTQLGEQCWTARIRAVGLLTVISKGCSLNCVDDSQDYYVGKKNITCCDTDLCNASGAHALQPAAAILALLPALGLLLWGPGQL

SEQ ID NO: 515 - DNA, 990 bp, Human
  misc_feature (1)...(990): n = A,T,C or G
agggagaggcagtgaccatgaaggctgtgctgcttgccctgttgatggcaggcttggccctgcagccaggcactgccctgctgtgctactcctgcaaagcccaggtgagcaacgaggactgcctgcaggtggagaactgcacccagctgggggagcagtgctggaccgcgcgcatccgcgcagttggcctcctgaccgtcatcagcaaaggctgcagcttgaactgcgtggatgactcacaggactactacgtgggcaagaagaacatcacgtgctgtgacaccgacttgtgcaacgccagcggggcccatgccctgcagccggctgccgccatccttgcgctgctccctgcactcggcctgctgctctggggacccggccagctataggctctggggggccccgctgcagcccacactgggtgtggtgccccaggcctttgtgccactcctcacagaacctggcccagtgggagcctgtcctggttcctgaggcacatcctaacgcaagtttgaccatgtatgtttgcaccccttttccccnaaccctgaccttcccatgggccttttccaggattccnaccnggcagatcagttttagtganacanatccgcntgcagatggcccctccaaccntttntgttgntgtttccatggcccagcattttccacccttaaccctgtgttcaggcacttnttcccccaggaagccttccctgcccaccccatttatgaattgagccaggtttggtccgtggtgtcccccgcacccagcaggggacaggcaatcaggagggcccagtaaaggctgagatgaagtggactgagtagaactggaggacaagagttgacgtgagttcctgggagtttccagagatggggcctggaggcctggaggaaggggccaggcctcacatttgtggggntcccgaatggcagcctgagcacagcgtaggcccttaataaacacctgttggataagccaaaaaa

SEQ ID NO: 516 - protein, 119 aa, Human
MRLCCLPCWQAWPCSQALPCCATPAKPRATRTACRWRTAPSWGSSAGPRASAQLASPSSAKAAATAWMTHRTTTWARRTSRAVTPTCATPAGPMPCSRLPPSLRCSLHSACCSGDPASY

SEQ ID NO: 517 - DNA, 360 bp, Human
atgaggctgtgctgcttgccctgttggcaggcttggccctgcagccaggcactgccctgctgtgctactcctgcaaagcccagggcaacgaggactgcctgcaggtggagaactgcacccagctgggggagcagtgctggaccgcgcgcatccgcgcagttggcctccccgtcatcagcaaaggctgcagctactgcgtggatgactcacaggactactacgtgggcaagaagaacatcacgtgctgtgacaccgacttgtgcaacgccagcggggcccatgccctgcagccggctgccgccatccttgcgctgctccctgcactcggcctgctgctctggggacccggccagctattga

SEQ ID NO: 518 - protein, 122 aa, Human [sequence omitted]

SEQ ID NO: 519 - DNA, 369 bp, Human
atggaaggctgtgctgcttgccctgttgatggcaggcttggccctgcagccaggcactgccctgctgtgctactcctgcaaagcccaggtgagcaacgaggactgcctgcaggtggagaactgcacccagctgggggagcagtgctggaccgcgcgcatccgcgcagttggcctcctgaccgtcatcagcaaaggctgcagcttgaactgcgtggactcacaggactactacgtgggcaagaagaacatcacgtgctgcaccgacttgtgcaacgccagcggggcccatgccctgcagccggctgccgccatccttgcgctgctccctgcactcggcctgctgctctggggacccggccagctatatga

SEQ ID NO: 520 - protein, 71 aa, Human
EGCAACPVDGRLGPAARHCPAVLLLQSPGEQRGLPAGGELHPAGGAVLDRAHPRSWPPDRHQQRLQLELRG

SEQ ID NO: 521 - protein, 51 aa, Human
MTHRTTTWARRTSRAVTPTCATPAGPMPCSRLPPSLRCSLHSACCSGDPAS

SEQ ID NO: 522 - DNA, 28 bp, Human
cctcattcctactcagcaacctccagcc

SEQ ID NO: 523 - DNA, 28 bp, Human
gtccatcagccagaacaggaacgtagcc

SEQ ID NO: 524 - DNA, 25 bp, Human
gttggatacaggccagactttgttg

SEQ ID NO: 525 - DNA, 23 bp, Human
gagggtaggctggcctataggct

SEQ ID NO: 526 - protein, 13 aa, Human
ESCTPPPGQGSKP

SEQ ID NO: 527 - protein, 15 aa, Human
ELHPSSWPGQQALAL

SEQ ID NO: 528 - protein, 15 aa, Human
SSWPGQQALALASCF

SEQ ID NO: 529 - protein, 16 aa, Human
GQQALALASCFCFFSG

SEQ ID NO: 530 - protein, 14 aa, Human
METEVPLTPFPLTP

SEQ ID NO: 531 - protein, 17 aa, Human
MATRIWPTHPAGHGAAL

SEQ ID NO: 532 - protein, 15 aa, Human
MSPINMNRFIFEAQT

SEQ ID NO: 533 - protein, 15 aa, Human
NMNRFIFEAQTLTGL

SEQ ID NO: 534 - protein, 15 aa, Human
MARTFLEFGVKSTTL

SEQ ID NO: 535 - protein, 15 aa, Human
FLEFGVKSTTLYIVR

SEQ ID NO: 536 - protein, 15 aa, Human
GVKSTTLYIVRVFTI

SEQ ID NO: 537 - protein, 15 aa, Human
TTLYIVRVFTISLYP

SEQ ID NO: 538 - protein, 15 aa, Human
IVRVFTISLYPPGPL

SEQ ID NO: 539 - protein, 14 aa, Human
FTISLYPPGPLRTP

SEQ ID NO: 540 - protein, 15 aa, Human
MEFTSRKRNLGSKGV

SEQ ID NO: 541 - protein, 15 aa, Human
SRKRNLGSKGVSWSM

SEQ ID NO: 542 - protein, 16 aa, Human
NLGSKGVSWSMKSSIT

SEQ ID NO: 543 - protein, 14 aa, Human
MFTTDSFLPMLLAT

SEQ ID NO: 544 - protein, 15 aa, Human
MRRSTSRIPSCYLAA

SEQ ID NO: 545 - protein, 15 aa, Human
TSRIPSCYLAAALAV

SEQ ID NO: 546 - protein, 15 aa, Human
PSCYLAAALAVLWRG

SEQ ID NO: 547 - protein, 15 aa, Human
LAAALAVLWRGLLSW

SEQ ID NO: 548 - protein, 14 aa, Human
LAVLWRGLLSWLAL

SEQ ID NO: 549 - DNA, 1629 bp, Human
gttggcagaggtggcggcggcggcatgggtgccccgacgttgccccctgcctggcagccctttctcaaggaccaccgcatctctacattcaagaactggcccttcttggagggctgcgcctgcaccccggagcggatggccgaggctggcttcatccactgccccactgagaacgagccagacttggcccagtgtttcttctgcttcaaggagctggaaggctgggagccagatgacgaccccatagaggaacataaaaagcattcgtccggttgcgctttcctttctgtcaagaagcagtttgaagaattaacccttggtgaatttttgaaactggacagagaaagagccaagaacaaaattgcaaaggaaaccaacaataagaagaaagaatttgaggaaactgcgaagaaagtgcgccgtgccatcgagcagctggctgccatggattgaggcctctggccggagctgcctggtcccagagtggctgcaccacttccagggtttattccctggtgccaccagccttcctgtgggccccttagcaatgtcttaggaaaggagatcaacattttcaaattagatgtttcaactgtgctcttgttttgtcttgaaagtggcaccagaggtgcttctgcctgtgcagcgggtgctgctggtaacagtggctgcttctctctctctctctcttttttgggggctcatttttgctgttttgattcccgggcttaccaggtgagaagtgagggaggaagaaggcagtgtcccttttgctagagctgacagctttgttcgcgtgggcagagccttccacagtgaatgtgtctggacctcatgttgttgaggctgtcacagtcctgagtgtggacttggcaggtgcctgttgaatctgagctgcaggttccttatctgtcacacctgtgcctcctcagaggacagtttttttgttgttgtgtttttttgtttttttttttttggtagatgcatgacttgtgtgtgatgagagaatggagacagagtccctggctcctctactgtttaacaacatggctttcttattttgtttgaattgttaattcacagaatagcacaaactacaattaaaactaagcacaaagccattctaagtcattggggaaacggggtgaacttcaggtggatgaggagacagaatagagtgataggaagcgtctggcagatactccttttgccactgctgtgtgattagacaggcccagtgagccgcggggcacatgctggccgctcctccctcagaaaaaggcagtggcctaaatcctttttaaatgacttggctcgatgctgtgggggactggctgggctgctgcaggccgtgtgtctgtcagcccaaccttcacatctgtcacgttctccacacgggggagagacgcagtccgcccaggtccccgctttctttggaggcagcagctcccgcagggctgaagtctggcgtaagatgatggatttgattcgccctcctccctgtcatagagctgcagggtggattgttacagcttcgctggaaacctctggaggtcatctcggctgttcctgagaaataaaaagcctgtcatttcaaacacaaaaaaaaaaaaaaaaaaaaaaaaaaaa

SEQ ID NO: 550 - protein, 142 aa, Human
MGAPTLPPAWQPFLKDHRISTFKNWPFLEGCACTPERMAEAGFIHCPTENEPDLAQCFFCFKELEGWEPDDDPIEEHKKHSSGCAFLSVKKQFEELTLGEFLKLDRERAKNKIAKETNNKKKEFEETAKKVRRAIEQLAAMD

SEQ ID NO: 551 - protein, 73 aa, Human
WVPRRCPLPGSPFSRTTASLHSRTGPSWRAAPAPRSGWPRLASSTAPLRTSQTWPSVSSASRSWKAGSQMTTP

SEQ ID NO: 552 - protein, 47 aa, Human
GCPDVAPCLAALSQGPPHLYIQELALLGGLRLHPGADGRGWLHPLPH

SEQ ID NO: 553 - protein, 135 aa, Human [sequence omitted]

SEQ ID NO: 554 - DNA, 408 bp, Human
atgtgggtgccccgacgttgccccctgcctggcagccctttctcaaggaccaccgcatctctacattcaagaactggcccttcttggagggctgcgcctgcaccccggagcggatggccgaggctggcttcatccactgccccactgagaacgagccagacttggcccagtgtttcttctgcttcaaggagctggaaggctgggagccagatgacgaccccaaggaacataaaaagcattcgtccggttgcgctttcctttctgtcaagaagcagtttgaagaataactggacagagaaagagccaagaacaaaattgcaaaggaaaccaacaataagaagaaagaatttgaggaaactgcgaagaaagtgcgccgtgccatcgagcagctggctgccatggatttga

SEQ ID NO: 555 - protein, 121 aa, Human [sequence omitted]

SEQ ID NO: 556 - DNA, 366 bp, Human
atggggtgccccgacgttgccccctgcctggcagccctttctcaaggaccaccgcatctctacattcaagaactggcccttcttggagggctgcgcctgcaccccggagcggatggccgaggctggcttcatccactgccccacgaacgagccagacttggcccagtgtttcttctgcttcaaggagctggaaggctgggagccagaaaagcattcgtccggttgcgctttcctttctgtcaagaagcagttatttttgaaactggacagagaaagagccaagaacaaaattgcaaaggaaaccaacaaggaaactgcgaagaaagtgcgccgtgccatcgagcagctggctgccatggattgtga

SEQ ID NO: 557 - DNA, 2970 bp, Human
ggggtaaggagttcaaggcagcgcccacacccgggggctctccgcaacccgaccgcctgtccgctcccccacttcccgccctccctcccacctactcattcacccacccacccacccagagccgggacggcagcccaggcgcccgggccccgccgtctcctcgccgcgatcctggacttcctcttgctgcaggacccggcttccacgtgtgtcccggagccggcgtctcagcacacgctccgctccgggcctgggtgcctacagcagccagagcagcagggagtccgggacccgggcggcatctgggccaagttaggcgccgccgaggccagcgctgaacgtctccagggccggaggagccgcggggcgtccgggtctgagcctcagcaaatgggctccgacgtgcgggacctgaacgcgctgctgcccgccgtcccctccctgggtggcggcggcggctgtgccctgcctgtgagcggcgcggcgcagtgggcgccggtgctggactttgcgcccccgggcgcttcggcttacgggtcgttgggcggccccgcgccgccaccggctccgccgccacccccgccgccgccgcctcactccttcatcaaacaggagccgagctggggcggcgcggagccgcacgaggagcagtgcctgagcgccttcactgtccacttttccggccagttcactggcacagccggagcctgtcgctacgggcccttcggtcctcctccgcccagccaggcgtcatccggccaggccaggatgtttcctaacgcgccctacctgcccagctgcctcgagagccagcccgctattcgcaatcagggttacagcacggtcaccttcgacgggacgcccagctacggtcacacgccctcgcaccatgcggcgcagttccccaaccactcattcaagcatgaggatcccatgggccagcagggctcgctgggtgagcagcagtactcggtgccgcccccggtctatggctgccacacccccaccgacagctgcaccggcagccaggctttgctgctgaggacgccctacagcagtgacaatttataccaaatgacatcccagcttgaatgcatgacctggaatcagatgaacttaggagccaccttaaagggccacagcacagggtacgagagcgataaccacacaacgcccatcctctgcggagcccaatacagaatacacacgcacggtgtcttcagaggcattcaggatgtgcgacgtgtgcctggagtagccccgactcttgtacggtcggcatctgagaccagtgagaaacgccccttcatgtgtgcttacccaggctgcaataagagatattttaagctgtcccacttacagatgcacagcaggaagcacactggtgagaaaccataccagtgtgacttcaaggactgtgaacgaaggttttctcgttcagaccagctcaaaagacaccaaaggagacatacaggtgtgaaaccattccagtgtaaagcttgtcagcgaaagttctcccggtccgaccacctgaagacccacaccaggactcatacaggtgaaaagcccttcagctgtcggtggccaagttgtcagaaaaagtttgcccggtcagatgaattagtccgccatcacaacatgcatcagagaaacatgaccaaactccagctggcgctttgaggggtctccctcggggaccgttcagtgtcccaggcagcacagtgtgtgaactgctttcaagtctgactctccactcctcctcactaaaaaggaaacttcagttgatcttcttcatccaacttccaagacaagataccggtgcttctggaaactaccaggtgtgcctggaagagttggtctctgccctgcctacttttagttgactcacaggccctggagaagcagctaacaatgtctggttagttaaaagcccattgccatttggtctggattttctactgtaagaagagccatagctgatcatgtccccctgacccttcccttctttttttatgctcgttttcgctggggatggaattattgtaccattttctatcatggaatatttataggccagggcatgtgtatgtgtctgctaatgtaaactttgtcatggtttccatttactaacagcaacagcaagaaataaatcagagagcaaggcatcgggggtgaatcttgtctaacattcccgaggtcagccaggctgctaacctggaaagcaggatgtagttctgccaggcaacttttaaagctcatgcatttcaagcagctgaagaaagaatcagaactaaccagtacctctgtatagaaatctaaaagaattttaccattcagttaattcaatgtgaacactggcacactgctcttaagaaactatgaagatctgagatttttttgtgtatgtttttgactcttttgagtggtaatcatatgtgtctttatagatgtacatacctccttgcacaaatggaggggaattcattttcatcactgggagtgtccttagtgtataaaaaccatgctggtatatggcttcaagttgtaaaaatgaaagtgactttaaaagaaaataggggatggtccaggatctccactgataagactgtttttaagtaacttaaggacctttgggtctacaagtatatgtgaaaaaaatgagacttactgggtgaggaaatccattgtttaaagatggtcgtgtgtgtgtgtgtgtgtgtgtgtgtgttgtgttgtgttttgttttttaagggagggaatttattatttaccgttgcttgaaattactgtgtaaatatatgtctgataatgatttgctctttgacaactaaaattaggactgtataagtactagatgcatcactgggtgttgatcttacaagatattgatgataacacttaaaattgtaacctgcatttttcactttgctctcaattaaagtctattcaaaaggaaaaaaaaaaaaaaaa

SEQ ID NO: 558 - protein, 429 aa, Human
MGSDVRDLNALLPAVPSLGGGGGCALPVSGAAQWAPVLDFAPPGASAYGSLGGPAPPPAPPPPPPPPPHSFIKQEPSWGGAEPHEEQCLSAFTVHFSGQFTGTAGACRYGPFGPPPPSQASSGQARMFPNAPYLPSCLESQPAIRNQGYSTVTFDGTPSYGHTPSHHAAQFPNHSFKHEDPMGQQGSLGEQQYSVPPPVYGCHTPTDSCTGSQALLLRTPYSSDNLYQMTSQLECMTWNQMNLGATLKGHSTGYESDNHTTPILCGAQYRIHTHGVFRGIQDVRRVPGVAPTLVRSASETSEKRPFMCAYPGCNKRYFKLSHLQMHSRKHTGEKPYQCDFKDCERRFSRSDQLKRHQRRHTGVKPFQCKACQRKFSRSDHLKTHTRTHTGEKPFSCRWPSCQKKFARSDELVRHHNMHQRNMTKLQLAL

SEQ ID NO: 559 - protein, 128 aa, Human
GLRRAGPERAAARRPLPGWRRRLCPACERRGAVGAGAGLCAPGRFGLRVVGRPRAATGSAATPAAAASLLHQTGAELGRRGAARGAVPERLHCPLFRPVHWHSRSLSLRALRSSSAQPGVIRPGQDVS

SEQ ID NO: 560 - protein, 50 aa, Human
MRRSSPTTHSSMRIPWASRARWVSSSTRCRPRSMAATPPPTAAPAARLCC

SEQ ID NO: 561 - protein, 23 aa, Human
MHDLESDELRSHLKGPQHRVRER

SEQ ID NO: 562 - protein, 395 aa, Human
MWAPTCGTTRCCPPSPPWVAAAAVPCLAARRSGRRCWTLRPRALRLTGRWAAPRRHRLRRHPRRRRLTPSSNRSRAGAARSRTRSSAAPSLSTFPASSLAQPEPVATGPSVLLRPARRHPARPGCFLTRPTCPAASRASPLFAIRVTARSPSTGRPATVTRPRTMRRSSPTTHSSMRIPWASRARWVSSSTRCRPRSMAATPPPTAAPAARLCCGRPTAVTIYTKRATAQGTRAITTQRPSSAEPNTEYTRTVSSEAFRMCDVCLEPRLLYGRHLRPVRNAPSCVLTQAAIRDILSCPTYRCTAGSTLVRNHTSVTSRTVNEGFLVQTSSKDTKGDIQVNHSSVKLVSESSPGPTTRPTPGLIQVKSPSAVGGQVVRKSLPGQMNSAITTCIRET

SEQ ID NO: 563 - DNA, 1185 bp, Human
atgtgggctccgacgtgcgggaccacgcgctgctgcccgccgtcccctccctgggtggcggcggcggctgtgccctgcctggcggcgcggcgcagtgggcgccggtgctggactttgcgcccccgggcgcttcggcttacgggtcgttgggcggccccgcgccgccaccggctccgccgccacccccgccgccgccgcctcactccttcatcaaacaggagccgagctggggcggcgcggagccgcacgaggagcagtgccgcgccttcactgtccacttttccggccagttcactggcacagccggagcctgtcgctacgggcccttcggtcctcctccgcccagccaggcgtcatccggccaggccaggatgtttcctaacgcgccctacctgcccagctgcctcgagagccagcccgctattcgcaatcagggttacagcacggtcaccttcgacgggacgcccagctacggtcacacgccctcgcaccatgcggcgcagttccccaaccactcattcaagcatgaggatcccatgggccagcagggctcgctgggtgagcagcagtactcggtgccgcccccggtctatggctgccacacccccaccgacagctgcaccggcagccaggctttgctgcggacgccctacagcagtgacaatttataccaaaagggccacagcacagggtacgagagcgataaccacacaacgcccatcctctgcggagcccaatacagaatacacacgcacggtgtcttcagaggcattcaggatgtgcgacgtgtgcctggagccccgactcttgtacggtcggcatctgagaccagtgagaaacgccccttcatgtgtgcttacccaggctgcaataagagatattttaagctgtcccacttacagatgcacagcaggaagcacactggtgagaaaccataccagtgtgacttcaaggactgtgaacgaaggttttctcgttcagaccagctcaaaagacaccaaaggagacatacaggtgaaccattccagtgtaaagcttgtcagcgaaagttctcccggtccgaccaccagacccacaccaggactcatacaggtgaaaagcccttcagctgtcggtggccaagttgtcagaaaaagtttgcccggtcagatgaattccgccatcacaacatgcatcagagaaaca

SEQ ID NO: 564 - protein, 399 aa, Human [sequence omitted]

SEQ ID NO: 565 - DNA, 1200 bp, Human
atggggctccgacgtgcgggacctgaacgcgctgctgcccgccgtcccctccctgggtggcggcggcggctgtgccctgcctgtgagcggcgcggcgcagtgggcgccggtgctggactttgcgcccccgggcgcttcggcttacgggtcgttgggcggccccgcgccgccaccggctccgccgccacccccgccgccgccgcctcactccttcatcaaacaggagccgagctggggcggcgcggagccgcacgaggagcagtgcctgagcgccttcactgtccacttttccggccagttcactggcacagccggagcctgtcgctacgggcccttcggtcctcctccgcccagccaggcgtcatccggccaggccaggatgtttcccgcgccctacctgcccagctgcctcgagagccagcccgctattcgcaatcagggttacagcacggtcaccttcgacgggacgcccagctacggtcacacgccctcgcaccatgcggcgcagttccccaaccactcattcaagcaggatcccatgggccagcagggctcgctggggcagcagtactcggtgccgcccccggtctatggctgccacacccccaccgacagctgcaccggcagccaggctttgctgctgaggacgccctacagcagcaatttataccaaatgacatcccagctatgcatgacctggaatcagatgaacttaggagccaccttaaagggccacagcacagggtacgagagcgaccacacaacgcccatcctctgcggagcccaatacagaatacacacgcacggtgtcttcagaggcattcaggatgtgcgacgtgtgcctggagtagccccgactcttgtacggtcggcatcgaaacgccccttcatgtgtgcttacccaggctgcaagctgtcccacttacagatgcacagcaggaagcacactggacgaaggttttctcgttcagaccagctcaaaagacaccaaaggagacatacaggtgtgaaaccattccagtgagcttgtcagcgaaagttctcccggtccgaccacctgaagacccacaccaggactcatacaggaaagcccttcagctgtcggtggccaagttgtcagaaaaagtttgcccggtcagaattagtccgccatcacaacatgcatcagagaaacatgaccaaactccagctggcgcttga

SEQ ID NO: 566 - DNA, 1905 bp, Human
ggcacgagagcttacagcctgagaagagcgtctcgcccgggagcggcggcggccatcgagacccaaccccaaggcgcgtccccctcggcctcccagcgctcccaagccgcagcggccgcgccccttcagctagctcgctcgctcgctctgcttccctgctgccggctgcgccatggcgttggcgttggcggcgctggcggcggtcgagccggcctgcggcagccggtaccagcagttgcagaatgaagaagagtctggagaacctgaacaggctgcaggtgatgctcctccaccttacagcagcatttctgcagagagcgcagcatattttgactacaaggatgagtctgggtttccaaagcccccatcttacaatgtagctacaacactgcccagttatgatgaagcggagaggaccaaggctgaagctactatccctttggttcctgggagagatgaggattttgtgggtcgggatgattttgatgatgctgaccagctgaggataggaaatgatgggattttcatgttaacttttttcatggcattcctctttaactggattgggtttttcctgtctttttgcctgaccacttcagctgcaggaaggtatggggccatttcaggatttggtctctctctaattaaatggatcctgattgtcaggttttccacctatttccctggatattttgatggtcagtactggctctggtgggtgttccttgttttaggctttctcctgtttctcagaggatttatcaattatgcaaaagttcggaagatgccagaaactttctcaaatctccccaggaccagagttctctttatttattaaagatgttttctggcaaaggccttcctgcatttatgaattctctctcaagaagcaagagaacacctgcaggaagtgaatcaagatgcagaacacagaggaataatcacctgctttaaaaaaataaagtactgttgaaaagatcatttctctctatttgttcctaggtgtaaaattttaatagttaatgcagaattctgtaatcattgaatcattagtggttaatgtttgaaaaagctcttgcaatcaagtctgtgatgtattaataatgccttatatattgtttgtagtcattttaagtagcatgagccatgtccctgtagtcggtagggggcagtcttgctttattcatcctccatctcaaaatgaacttggaattaaatattgtaagatatgtataatgctggccattttaaaggggttttctcaaaagttaaacttttgttatgactgtgtttttgcacataatccatatttgctgttcaagttaatctagaaatttattcaattctgtatgaacacctggaagcaaaatcatagtgcaaaaatacatttaaggtgtggtcaaaaataagtctttaattggtaaataataagcattaattttttatagcctgtattcacaattctgcggtaccttattgtacctaagggattctaaaggtgttgtcactgtataaaacagaaagcactaggatacaaatgaagcttaattactaaaatgtaattcttgacactctttctataattagcgttcttcacccccacccccacccccaccccccttattttccttttgtctcctggtgattaggccaaagtctgggagtaaggagaggattaggtacttaggagcaaagaaagaagtagcttggaacttttgagatgatccctaacatactgtactacttgcttttacaatgtgttagcagaaaccagtgggttataatgtagaatgatgtgctttctgcccaagtggtaattcatcttggtttgctatgttaaaactgtaaatacaacagaacattaataaatatctcttgtgtagcaaaaaaaaaaaaaaaaaaaaa

SEQ ID NO: 567 - protein, 221 aa, Human
MALALAALAAVEPACGSRYQQLQNEEESGEPEQAAGDAPPPYSSISAESAAYFDYKDESGFPKPPSYNVATTLPSYDEAERTKAEATIPLVPGRDEDFVGRDDFDDADQLRIGNDGIFMLTFFMAFLFNWIGFFLSFCLTTSAAGRYGAISGFGLSLIKWILIVRFSTYFPGYFDGQYWLWWVFLVLGFLLFLRGFINYAKVRKMPETFSNLPRTRVLFIY

SEQ ID NO: 568 - protein, 30 aa, Human
WRWRWRRWRRSSRPAAAGTSSCRMKKSLEN

SEQ ID NO: 569 - protein, 23 aa, Human
GVGVGGAGGGRAGLRQPVPAVAE

SEQ ID NO: 570 - protein, 45 aa, Human
MKKSLENLNRLQVMLLHLTAAFLQRAQHILTTRMSLGFQSPHLTM

SEQ ID NO: 571 - protein, 34 aa, Human
MMKRRGPRLKLLSLWFLGEMRILWVGMILMMLTS

SEQ ID NO: 572 - protein, 10 aa, Human
MGPFQDLVSL

SEQ ID NO: 573 - protein, 15 aa, Human
MDPDCQVFHLFPWIF

SEQ ID NO: 574 - protein, 12 aa, Human
MVSTGSGGCSLF

SEQ ID NO: 575 - protein, 201 aa, Human [sequence omitted]

SEQ ID NO: 576 - DNA, 606 bp, Human
atgtggcgttggcgttggcggcgctggcggcggtcgagccggcctgcggcagccggtaccagcagttgcagaatgaagaagagtctggagaacctgaacaggctgcaggtgatgctcctccaccttacagcagcatttctgcagagagcgcagcatattttgactacaaggatgagtctgggtttccaaagcccccatcttacaatgctacaacactgcccagttatgatgaagcggagaggaccaaggctgaagctactatccctttggttcctgggagagatgaggattttgtgggtcgggatgattttgatgatgctgaccagccttttttcatggcattcctctttaactggattgggtttttcctgtctttttgccccacttcagctgcaggaaggtatggggccatttcaggatttggtctctctcttgtcaggttttccacctatttccctggatattttgatggtcagtactggctctggtgggtgttccttgtttgctttctcctgtttctcagaggatttatcaattatgcaaaagttcggaagatgccagaaactttctcaaatctccccaggaccagagttctctttattttga

SEQ ID NO: 577 - protein, 171 aa, Human [sequence omitted]

SEQ ID NO: 578 - DNA, 516 bp, Human
atgggcgttggcgttggcggcgctggcggcggtcgagccggcctgcggcagccggtaccagcagttgcagaatgctcctccaccttacagcagcatttctgcagagagcgcagcatatttgtctgggtttccaaagcccccatcttacaatgtagctacaacactgcccagttaagctactatccctttggttcctgggagagatgggattttcatgttaacttttttcatggcattcctcttctggattgggtttttcctgtctttttgcctgaccacttcagctgcaggaaggtatggggccatttcaggatttggtctctctctaatatggatcctgattgtcaggttttccacctatttccctggatattttggtcagtactggctctggtgggtgttccttgttttaggctttctcctgtttctcagaggatttatcaattatgcaaaagttcggaagatgccagaaactttctcaaatctccccaggaccagagttctctttatttatga

SEQ ID NO: 579 - DNA, 1054 bp, Human
cgcagcctccaaagccgccttcctcagggaaatttgcgtgaccttactgccctccgtctacaggccttgtacctctccaggccgatttttccacaatttaaatcccagttcacctggtatccagctccagcaacttagagcgtttcacgtcacgccgggcgccaggcgtcggcttgtataacctgaaaacgctcctgtttttctcatctgtgcagtgggttttgattcccaccatggccatcacccagtttcggttatttaaattttgtacctgcctagcaacagtattctcattcctaaagagattaatatgcagatctggcagaggacggaaattaagtggagaccaaataactttgccaactacagttgattattcatcagttcctaagcagacagatgttgaagagtggacttcctgggatgaagatgcacccaccagtgtaaagatcgaaggagggaatgggaatgtggcaacacaacaaaattctttggaacaactggaacctgactattttaaggacatgacaccaactattaggaaaactcagaaaattgttattaagaagagagaaccattgaattttggcatcccagatgggagcacaggtttctctagtagattagcagctacacaagatctgccttttattcatcagtcttctgaattaggtgacttagatacctggcaggaaaataccaatgcatgggaagaagaagaagatgcagcctggcaagcagaagaagttctgagacagcagaaactagcagacagagaaaagagagcagccgaacaacaaaggaagaaaatggaaaaggaagcacaacggctaatgaagaaggaacaaaacaaaattggtgtgaaactttcataacacatgttcaaattttatcatgccagtaggagaaatctcagctccacaacccaagcaacatttgtatggatttaagagtattttaagaagacatactgcttgattttaatacattgatcaggccatccaggacaccacgattctcccaaagtaccttgaactcttagtgattgagactc

SEQ ID NO: 580 - protein, 213 aa, Human
MAITQFRLFKFCTCLATVFSFLKRLICRSGRGRKLSGDQITLPTTVDYSSVPKQTDVEEWTSWDEDAPTSVKIEGGNGNVATQQNSLEQLEPDYFKDMTPTIRKTQKIVIKKREPLNFGIPDGSTGFSSRLAATQDLPFIHQSSELGDLDTWQENTNAWEEEEDAAWQAEEVLRQQKLADREKRAAEQQRKKMEKEAQRLMKKEQNKIGVKLS

SEQ ID NO: 581 - protein, 14 aa, Human
WPSPSFGYLNFVPA

SEQ ID NO: 582 - protein, 20 aa, Human
MQIWQRTEIKWRPNNFANYS

SEQ ID NO: 583 - protein, 15 aa, Human
MLKSGLPGMKMHPPV

SEQ ID NO: 584 - protein, 21 aa, Human
MGMWQHNKILWNNWNLTILRT

SEQ ID NO: 585 - protein, 9 aa, Human
MGAQVSLVD

SEQ ID NO: 586 - protein, 16 aa, Human
MHGKKKKMQPGKQKKF

SEQ ID NO: 587 - protein, 56 aa, Human
MGRRRRCSLASRRSSETAETSRQRKESSRTTKEENGKGSTTANEEGTKQNWCETFI

SEQ ID NO: 588 - protein, 169 aa, Human [sequence omitted]

SEQ ID NO: 589 - DNA, 510 bp, Human
atgtggccatcacccagtttcggttatttaaattttgtacctgcctatgcagatctggcagaggacggaaatctttgccaactacagttgattattcatcagttcctaagcagacagatgttgaagagtggacttcctgggatgaagatgcacccaccagtgagatcgaaggagggaatgggaatgtggcaacacaacaaaattctttggaacaactggaacctgactattttaaggacacaccaactattaggaaaactcagaaaattgttattaagaagagagaaccatattttggcatcccagatgggagcacaggtttctctagtagatcagctacacaagatctgccttttattcatcagtcttctgaatatacctggcaggaaaataccaatgcatgggaagaagaagaagatgcagcctggcaagcagaagaagttccagacagagaaaagagagcagccgaacaacaaaggaagaaaatggaaaaggaagcacaacggctga

SEQ ID NO: 590 - protein, 170 aa, Human [sequence omitted]

SEQ ID NO: 591 - DNA, 513 bp, Human
atgggccatcacccagtttcggttattattttgtacctgcctagcaacagtattctcattcctaaagagattaatatgcagatctggcagaggacggaaattaagtggagaccaatgaataactttgccaactacagtagatgcacccaccagtgtaaagatcgaaggagggaatgggaatgtggcaacacaacaaaattctttggaacaactggaaccgaagagagaaccattgaattttggcatcccagatgggagcacaggtttctcattagcagctacacaagatctgccttttattcatcagtcttccttagatacctggcaggaaaataccaatgcatgggaagaagaagaagatgcagcctggcaagcagaagaagttctgagacagcagaaactagcagacagagaaaagagagcagccgaacaacaaaggaagaaaatggaaaaggaagcacaacggctaatgaagaaggaacaaaacaaaattggtgtgaaactttcatatga

SEQ ID NO: 592 - DNA, 5128 bp, Human
actctggagtgggagtgggagcgagcgcttctgcgactccagttgtgagagccgcaagggcatgggaattgacgccactcaccgacccccagtctcaatctcaacgctgtgaggaaacctcgactttgccaggtccccaagggcagcggggctcggcgagcgaggcacccttctccgtccccatcccaatccaagcgctcctggcactgacgacgccaagagactcgagtgggagttaaagcttccagtgagggcagcaggtgtccaggccgggcctgcgggttcctgttgacgtcttgccctaggcaaaggtcccagttccttctcggagccggctgtcccgcgccactggaaaccgcacctccccgcagcatgggcaccagcctcagcccgaacgacccttggccgctaaacccgctgtccatccagcagaccacgctcctgctactcctgtcggtgctggccactgtgcatgtgggccagcggctgctgaggcaacggaggcggcagctccggtccgcgcccccgggcccgtttgcgtggccactgatcggaaacgcggcggcggtgggccaggcggctcacctctcgttcgctcgcctggcgcggcgctacggcgacgttttccagatccgcctgggcagctgccccatagtggtgctgaatggcgagcgcgccatccaccaggccctggtgcagcagggctcggccttcgccgaccggccggccttcgcctccttccgtgtggtgtccggcggccgcagcatggctttcggccactactcggagcactggaaggtgcagcggcgcgcagcccacagcatgatgcgcaacttcttcacgcgccagccgcgcagccgccaagtcctcgagggccacgtgctgagcgaggcgcgcgagctggtggcgctgctggtgcgcggcagcgcggacggcgccttcctcgacccgaggccgctgaccgtcgtggccgtggccaacgtcatgagtgccgtgtgtttcggctgccgctacagccacgacgaccccgagttccgtgagctgctcagccacaacgaagagttcgggcgcacggtgggcgcgggcagcctggtggacgtgatgccctggctgcagtacttccccaacccggtgcgcaccgttttccgcgaattcgagcagctcaaccgcaacttcagcaacttcatcctggacaagttcttgaggcactgcgaaagccttcggcccggggccgccccccgcgacatgatggacgcctttatcctctctgcggaaaagaaggcggccggggactcgcacggtggtggcgcgcggctggatttggagaacgtaccggccactatcactgacatcttcggcgccagccaggacaccctgtccaccgcgctgcagtggctgctcctcctcttcaccaggtatcctgatgtgcagactcgagtgcaggcagaattggatcaggtcgtggggagggaccgtctgccttgtatgggtgaccagcccaacctgccctatgtcctggccttcctttatgaagccatgcgcttctccagctttgtgcctgtcactattcctcatgccaccactgccaacacctctgtcttgggctaccacattcccaaggacactgtggtttttgtcaaccagtggtctgtgaatcatgacccagtgaagtggcctaacccggagaactttgatccagctcgattcttggacaaggatggcctcatcaacaaggacctgaccagcagagtgatgattttttcagtgggcaaaaggcggtgcattggcgaagaactttctaagatgcagctttttctcttcatctccatcctggctcaccagtgcgatttcagggccaacccaaatgagcctgcgaaaatgaatttcagttatggtctaaccattaaacccaagtcatttaaagtcaatgtcactctcagagagtccatggagctccttgatagtgctgtccaaaatttacaagccaaggaaacttgccaataagaagcaagaggcaagctgaaattttagaaatattcacatcttcggagatgaggagtaaaattcagtttttttccagttcctcttttgtgctgcttctcaattagcgtttaaggtgagcataaatcaactgtccatcaggtgaggtgtgctccatacccagcggttcttcatgagtagtgggctatgcaggagcttctgggagatttttttgagtcaaagacttaaagggcccaatgaattattatatacatactgcatcttggttatttctgaaggtagcattctttggagttaaaatgcacatatagacacatacacccaaacacttacaccaaactactgaatgaagaagtattttggtaaccaggccatttttggtgggaatccaagattggtctcccatatgcagaaatagacaaaaagtatattaaacaaagtttcagagtatattgttgaagagacagagacaagtaatttcagtgtaaagtgtgtgattgaaggtgataagggaaaagataaagaccagaaattcccttttcaccttttcaggaaaataacttagactctagtatttatgggtggatttatccttttgccttctggtatacttccttacttttaaggataaatcataaagtcagttgctcaaaaagaaatcaatagttgaattagtgagtatagtggggttccatgagttatcatgaattttaaagtatgcattattaaattgtaaaactccaaggtgatgttgtacctcttttgcttgccaaagtacagaatttgaattatcagcaaagaaaaaaaaaaaagccagccaagctttaaattatgtgaccataatgtactgatttcagtaagtctcataggttaaaaaaaaaagtcaccaaatagtgtgaaatatattacttaactgtccgtaagcagtatattagtattatcttgttcaggaaaaggttgaataatatatgccttgtgtaatattgaaaattgaaaagtacaactaacgcaaccaagtgtgctaaaaatgagcttgattaaatcaaccacctatttttgacatggaaatgaagcagggtttcttttcttcactcaaattttggcgaatctcaaaattagatcctaagatgtgttcttatttttataacatctttattgaaattctatttataatacagaatcttgttttgaaaataacctaattaatatattaaaattccaaattcatggcatgcttaaattttaactaaattttaaagccattctgattattgagttccagttgaagttagtggaaatctgaacattctcctgtggaaggcagagaaatctaagctgtgtctgcccaatgaataatggaaaatgccatgaattacctggatgttctttttacgaggtgacaagagttggggacagaactcccattacaactgaccaagtttctcttctagatgattttttgaaagttaacattaatgcctgctttttggaaagtcagaatcagaagatagtcttggaagctgtttggaaaagacagtggagatgaggtcagttgtgttttttaagatggcaattactttggtagctgggaaagcataaagctcaaatgaaatgtatgcattcacatttagaaaagtgaattgaagtttcaagttttaaagttcattgcaattaaacttccaaagaaagttctacagtgtcctaagtgctaagtgcttattacattttattaagctttttggaatctttgtaccaaaattttaaaaaagggagtttttgatagttgtgtgtatgtgtgtgtggggtggggggatggtaagagaaaagagagaaacactgaaaagaaggaaagatggttaaacattttcccactcattctgaattaattaatttggagcacaaaattcaaagcatggacatttagaagaaagatgtttggcgtagcagagttaaatctcaaataggctattaaaaaagtctacaacatagcagatctgttttgtggtttggaatattaaaaaacttcatgtaattttattttaaaatttcatagctgtacttcttgaatataaaaaatcatgccagtatttttaaaggcattagagtcaactacacaaagcaggcttgcccagtacatttaaattttttggcacttgccattccaaaatattatgccccaccaaggctgagacagtgaatttgggctgctgtagcctatttttttagattgagaaatgtgtagctgcaaaaataatcatgaaccaatctggatgcctcattatgtcaaccaggtccagatgtgctataatctgtttttacgtatgtaggcccagtcgtcatcagatgcttgcggcaaaagaaagctgtgtttatatggaagaaagtaaggtgcttggagtttacctggcttatttaatatgcttataacctagttaaagaaaggaaaagaaaacaaaaaacgaatgaaaataactgaatttggaggctggagtaatcagattactgctttaatcagaaaccctcattgtgtttctaccggagagagaatgtatttgctgacaaccattaaagtcagaagttttactccaggttattgcaataaagtataatgtttattaaatgcttcatttgtatgtcaaagctttgactctataagcaaattgcttttttccaaaacaaaaagatgtctcaggtttgttttgtgaattttctaaaagctttcatgtcccagaacttagcctttacctgtgaagtgttactacagccttaatattttcctagtagatctatattagatcaaatagttgcatagcagtatatgttaatttgtgtgtttttagctgtgacacaactgtgtgattaaaaggtatactttagtagacatttataactcaaggataccttcttatttaatcttttcttatttttgtactttatcatgaatgcttttagtgtgtgcataatagctacagtgcatagttgtagacaaagtacattctggggaaacaacatttatatgtagcctttactgtttgatataccaaattaaaaaaaaattgtatctcattacttatactgggacaccattaccaaaataataaaaatcactttcataatcttgaaaaaa

SEQ ID NO: 593 - protein, 543 aa, Human
MGTSLSPNDPWPLNPLSIQQTTLLLLLSVLATVHVGQRLLRQRRRQLRSAPPGPFAWPLIGNAAAVGQAAHLSFARLARRYGDVFQIRLGSCPIVVLNGERAIHQALVQQGSAFADRPAFASFRVVSGGRSMAFGHYSEHWKVQRRAAHSMMRNFFTRQPRSRQVLEGHVLSEARELVALLVRGSADGAFLDPRPLTVVAVANVMSAVCFGCRYSHDDPEFRELLSHNEEFGRTVGAGSLVDVMPWLQYFPNPVRTVFREFEQLNRNFSNFILDKFLRHCESLRPGAAPRDMMDAFILSAEKKAAGDSHGGGARLDLENVPATITDIFGASQDTLSTALQWLLLLFTRYPDVQTRVQAELDQVVGRDRLPCMGDQPNLPYVLAFLYEAMRFSSFVPVTIPHATTANTSVLGYHIPKDTVVFVNQWSVNHDPVKWPNPENFDPARFLDKDGLINKDLTSRVMIFSVGKRRCIGEELSKMQLFLFISILAHQCDFRANPNEPAKMNFSYGLTIKPKSFKVNVTLRESMELLDSAVQNLQAKETCQ

SEQ ID NO: 594 - protein, 12 aa, Human
WAPASARTTLGR

SEQ ID NO: 595 - protein, 53 aa, Human
MASAPSTRPWCSRARPSPTGRPSPPSVWCPAAAAWLSATTRSTGRCSGAQPTA

SEQ ID NO: 596 - protein, 76 aa, Human
MCRLECRQNWIRSWGGTVCLVWVTSPTCPMSWPSFMKPCASPALCLSLFLMPPLPTPLSWATTFPRTLWFLSTSGL

SEQ ID NO: 597 - protein, 25 aa, Human
MSLSESPWSSLIVLSKIYKPRKLAN

SEQ ID NO: 598 - protein, 221 aa, Human
GHQPQPERPLAAKPAVHPADHAPATPVGAGHCACGPAAAEATEAAAPVRAPGPVCVATDRKRGGGGPGGSPLVRSPGAALRRRFPDPPGQLPHSGAEWRARHPPGPGAAGLGLRRPAGLRLLPCGVRRPQHGFRPLLGALEGAAARSPQHDAQLLHAPAAQPPSPRGPRAERGARAGGAAGARQRGRRLPRPEAADRRGRGQRHECRVFRLPLQPRRPRVP

SEQ ID NO: 599 - protein, 503 aa, Human
MWAPASARTTLGRTRCPSSRPRSCYSCRCWPLCMWASGCGNGGGSSGPRPRARLRGHSETRRRWARRLTSRSLAWRGATATFSRSAWAAAPMASAPSTRPWCSRARPSPTGRPSPPSVWCPAAAAWLSATTRSTGRCSGAQPTACATSSRASRAAAKSSRATCARRASWWRCWCAAARTAPSSTRGRVPCVSAAATATTTPSSVSCSATTKSSGARWARAAWWTCPGCSTSPTRCAPFSANSSSSTATSATSSWTSSGTAKAFGPGPPPATWTPLSSLRKRRRPGTRTVVARGWIWRTYRPLSLTSSAPARTPCPPRCSGCSSSSPGILMCRLECRQNWIRSWGGTVCLVWVTSPTCPMSWPSFMKPCASPALCLSLFLMPPLPTPLSWATTFPRTLWFLSTSGLSGLTRRTLIQLDSWTRMASSTRTFFQWAKGGALAKNFLRCSFFSSSPSWLTSAISGPTQMSLRKPLNPSHLKSMSLSESPWSSLIVLSKIYKPRKLAN

SEQ ID NO: 600 - DNA, 1512 bp, Human
atgtgggcaccagcctcagcccgaacgacccttggccgcacccgctgtccatccagcagaccacgctcctgctactcctgtcggtgctggccactgtgcatgtgggccagcggctgcggcaacggaggcggcagctccggtccgcgcccccgggcccgtttgcgtggccactcggaaacgcggcggcggtgggccaggcggctcacctctcgttcgctcgcctggcgcggcgctacggcgacgttttccagatccgcctgggcagctgccccaatggcgagcgcgccatccaccaggccctggtgcagcagggctcggccttcgccgaccggccggccttcgcctccttccgtgtggtgtccggcggccgcagcatggctttcggccactactcggagcactggaaggtgcagcggcgcgcagcccacagcatgcgcaacttcttcacgcgccagccgcgcagccgccaagtcctcgagggccacgtgcgcgaggcgcgcgagctggtggcgctgctggtgcgcggcagcgcggacggcgccttcctcgacccgaggccgcgtgccgtgtgtttcggctgccgctacagccacgacgaccccgagttccgtgagctgctcagccacaacgaagagttcgggcgcacggtgggcgcgggcagcctggtggacgtgccctggctgcagtacttccccaacccggtgcgcaccgttttccgcgaattcgagcagctcaaccgcaacttcagcaacttcatcctggacaagttctggcactgcgaaagccttcggcccggggccgccccccgcgacatggacgcctttatcctctctgcggaaaagaaggcggccggggactcgcacggtggtggcgcgcggctggatttggagaacgtaccggccactatcactgacatcttcggcgccagccaggacaccctgtccaccgcgctgcagtggctgctcctcctcttcaccaggtatcctgatgtgcagactcgagtgcaggcagaattggatcaggtcgtggggagggaccgtctgccttgtatgggtgaccagcccaacctgccctatgtcctggccttcctttatgaagccatgcgcttctccagctttgtgcctgtcactattcctcatgccaccactgccaacacctctgtcttgggctaccacattcccaaggacactgtggtttttgtcaaccagtggtctgagtggcctaacccggagaactttgatccagctcgattcttggacaaggatggcctcatcaacaaggaccttttttcagtgggcaaaaggcggtgcattggcgaagaactttctaagatgcagctttttctcttcatctccatcctggctcaccagtgcgatttcagggccaacccaaatgagcctgcgaaaaccattaaacccaagtcatttaaagtcaatgtcactctcagagagtccatggagctccttgatagtgctgtccaaaatttacaagccaaggaaacttgccaattga

SEQ ID NO: 601 - protein, 517 aa, Human
MGHQPQPERPLAAKPAVHPADHAPATPVGAGHCACGPAAAEATEAAAPVRAPGPVCVATDRKRGGGGPGGSPLVRSPGAALRRRFPDPPGQLPHSGAEWRARHPPGPGAAGLGLRRPAGLRLLPCGVRRPQHGFRPLLGALEGAAARSPQHDAQLLHAPAAQPPSPRGPRAERGARAGGAAGARQRGRRLPRPEAADRRGRGQRHECRVFRLPLQPRRPRVPAAQPQRRVRAHGGRGQPGGRDALAAVLPQPGAHRFPRIRAAQPQLQQLHPGQVLEALRKPSARGRPPRHDGRLYPLCGKEGGRGLARWWRAAGFGERTGHYHHLRRQPGHPVHRAAVAAPPLHQVSCADSSAGRIGSGRGEGPSALYGPAQPALCPGLPLSHALLQLCACHYSSCHHCQHLCLGLPHSQGHCGFCQPVVCESSSSILGQGWPHQQGPDQQSDDFFSGQKAVHWRRTFDAAFSLHLHPGSPVRFQGQPKACENEFQLWSNHSQCHSQRVHGAPCCPKFTSQGNLPI

SEQ ID NO: 602 - DNA, 1554 bp, Human
atggggcaccagcctcagcccgaacgacccttggccgctaaacccgctgtccatccagcagaccacgctcctgctactcctgtcggtgctggccactgtgcatgtgggccagcggctgctgaggcaacggaggcggcagctccggtccgcgcccccgggcccgtttgcgtggccactgatcggaaacgcggcggcggtgggccaggcggctcacctctcgttcgctcgcctggcgcggcgctacggcgacgttttccagatccgcctgggcagctgccccatagtggtgctgaatggcgagcgcgccatccaccaggccctggtgcagcagggctcggccttcgccgaccggccggccttcgcctccttccgtgtggtgtccggcggccgcagcatggctttcggccactactcggagcactggaaggtgcagcggcgcgcagcccacagcatgatgcgcaacttcttcacgcgccagccgcgcagccgccaagtcctcgagggccacgtgctgagcgaggcgcgcgagctggtggcgctgctggtgcgcggcagcgcggacggcgccttcctcgacccgaggccgctgaccgtcgtggccgtggccaacgtcatgagtgccgtgtgtttcggctgccgctacagccacgacgaccccgagttccggctgctcagccacaacgaagagttcgggcgcacggtgggcgcgggcagcctggtggacgtgatgccctggctgcagtacttccccaacccggtgcgcaccgttttccgcgaattcgagcagctcaaccgcaacttcagcaacttcatcctggacaagttcttgaggcactgcgaaagccttcggcccggggccgccccccgcgacatgatggacgcctttatcctctctgcggaaaagaaggcggccggggactcgcacggtggtggcgcgcggctggatttggagaacgtaccggccactatcaccatcttcggcgccagccaggacaccctgtccaccgcgctgcagtggctgctcctcctcttcaccaggtatcctgtgcagactcgagtgcaggcagaattggatcaggtcgtggggagggaccgtctgccttgtatgggccagcccaacctgccctatgtcctggccttcctttaagccatgcgcttctccagctttgtgcctgtcactattcctcatgccaccactgccaacacctctgtcttgggctaccacattcccaaggacactgtggtttttgtcaaccagtggtctgtgaatcatccagctcgattcttggacaaggatggcctcatcaacaaggacctgaccagcagagtgatgattttttcagtgggcaaaaggcggtgcattggcgaagaactttcgatgcagctttttctcttcatctccatcctggctcaccagtgcgatttcagggccaacccaaagcctgcgaaaatgaatttcagttatggtctaaccatagtcaatgtcactctcagagagtccatggagctccttgctgtccaaaatttacaagccaaggaaacttgccaatatga

SEQ ID NO: 603 - DNA, 47 bp, Human
tccatattgtgcttccaccactgccaataacaaaataactagcaacc

SEQ ID NO: 604 - protein, 15 aa, Human
HIVLPPLPITKLATM

SEQ ID NO: 605 - protein, 11 aa, Human
HIVLPPLPITK

SEQ ID NO: 606 - protein, 14 aa, Human
SILCFHHCQQNNQP

SEQ ID NO: 607 - protein, 9 aa, Human
SILCFHHCQ

SEQ ID NO: 608 - protein, 16 aa, Human
PYCASTTANNKITSNH

SEQ ID NO: 609 - DNA, 51 bp, Human
ggccagagtgtcttgacagcacaccagagaaatccagggacctgaccgaag

SEQ ID NO: 610 - protein, 17 aa, Human
GQSVLTAHQRNPGTPKM

SEQ ID NO: 611 - protein, 14 aa, Human
GQSVLTAHQRNPGT

SEQ ID NO: 612 - protein, 16 aa, Human
ARVSQHTREIQGPDRR

SEQ ID NO: 613 - protein, 12 aa, Human
QHTREIQGPDRR

SEQ ID NO: 614 - protein, 17 aa, Human
PECLDSTPEKSRDLTED

SEQ ID NO: 615 - DNA, 42 bp, Human
gcccgtacacaccgtgtgctgggacaccccacagtcagccgc

SEQ ID NO: 616 - protein, 14 aa, Human
ARTHRVLGHPTVSR

SEQ ID NO: 617 - protein, 14 aa, Human
PVHTVCWDTPQSAA

SEQ ID NO: 618 - protein, 14 aa, Human
PYTPCAGTPHSQPH

SEQ ID NO: 619 - DNA, 96 bp, Human
cgaccagcagaccagacagtcacagcagccttgacaaaacgttcctggaactcaagcacttctccacagaggaggacagagcagacagcagagacc

SEQ ID NO: 620 - protein, 32 aa, Human
RPADQTVTAALTKRSWNSSTSPQRRTEQTAET

SEQ ID NO: 621 - protein, 31 aa, Human [sequence omitted]

SEQ ID NO: 622 - protein, 10 aa, Human
DQQTRQSQQP

SEQ ID NO: 623 - protein, 21 aa, Human
QNVPGTQALLHRGGQSRQQRP

SEQ ID NO: 624 - protein, 32 aa, Human
TSRPDSHSSLDKTFLELKHFSTEEDRADSRDH

SEQ ID NO: 625 - DNA, 372 bp, Human
actctggagtgggagtgggagcgagcgcttctgcgactccagttgtgagagccgcaagggcatgggaattgacgccactcaccgacccccagtctcaatctcaacgctgtgaggaaacctcgactttgccaggtccccaagggcagcggggctcggcgagcgaggcacccttctccgtccccatcccaatccaagcgctcctggcactgacgacgccaagagactcgagtgggagttaaagcttccagtgagggcagcaggtgtccaggccgggcctgcgggttcctgttgacgtcttgccctaggcaaaggtcccagttccttctcggagccggctgtcccgcgccactggaaaccgcacctccccgcagc

SEQ ID NO: 626 - protein, 121 aa, Human
TLEWEWERALLRLQLEPQGHGNRHSPTPSLNLNAVRKPRLCQVPKGSGARRARHPSPSPSQSKRSWHRRQETRVGVKASSEGSRCPGRACGFLLTSCPRQRSQFLLGAGCPAPLETAPPRS

SEQ ID NO: 627 - protein, 15 aa, Human
TLEWEWERALLRLQL

SEQ ID NO: 628 - protein, 45 aa, Human
RHSPTPSLNLNAVRKPRLCQVPKGSGARRARHPSPSPSQSKRSWH

SEQ ID NO: 629 - protein, 54 aa, Human
RRQETRVGVKASSEGSRCPGRACGFLLTSCPRQRSQFLLGAGCPAPLETAPPRS

SEQ ID NO: 630 - protein, 122 aa, Human
LWSGSGSERFCDSSCESRKGMGIDATHRPPVSISTLGNLDFARSPRAAGLGERGTLLRPHPNPSAPGTDDAKRLEWELKLPVRAAGVQAGPAGSCRLALGKGPSSFSEPAVPRHWKPHLPAA

SEQ ID NO: 631 - protein, 36 aa, Human
LWSGSGSERFCDSSCESRKGMGIDATHRPPVSISTL

SEQ ID NO: 632 - protein, 59 aa, Human
GNLDFARSPRAAGLGERGTLLRPHPNPSAPGTDDAKRLEWELKLPVRAAGVQAGPAGSC

SEQ ID NO: 633 - protein, 27 aa, Human
RLALGKGPSSFSEPAVPRHWKPHLPAA

SEQ ID NO: 634 - protein, 121 aa, Human [sequence omitted]

SEQ ID NO: 635 - protein, 78 aa, Human
SGVGVGASASATPVVRAARAWELTPLTDPQSQSQRCEETSTLPGPQGQRGSASEAPFSVPIPIQALLALTTPRDSSGS

SEQ ID NO: 636 - protein, 17 aa, Human
GQQVSRPGLRVPVDVLP

SEQ ID NO: 637 - protein, 23 aa, Human
AKVPVPSRSRLSRATGNRTSPQH

SEQ ID NO: 638 - DNA, 225 bp, Human
cccgctctgcttcagcgcacgctgaagacggcactaggacccagggaagtccccgagcggggttcgcggaaaggcagccagactcctccttatctccagtgtcaaacttgacatcagcctgcgagcggagcatggtaacttctccagcaatcagagcgctccccctcacatcagtggcatgcttcatggagatatgctcctctcactgccctctgcaccagcaac

SEQ ID NO: 639 - protein, 73 aa, Human
PALLQRTLKTALGPREVPERGSRKGSQTPPYLQCQTHQPASGAWLLQQSERSPSHQWHASWRYAPLTALCTSN

SEQ ID NO: 640 - protein, 36 aa, Human
PALLQRTLKTALGPREVPERGSRKGSQTPPYLQCQT

SEQ ID NO: 641 - protein, 29 aa, Human
LLQQSERSPSHQWHASWRYAPLTALCTSN

SEQ ID NO: 642 - protein, 73 aa, Human [sequence omitted]

SEQ ID NO: 643 - protein, 63 aa, Human
DPGKSPSGVRGKAARLLLISSVKLDISLRAEHGNFSSNQSAPPHISGMLHGDMLLSLPSAPAT

SEQ ID NO: 644 - protein, 75 aa, Human
RSASAHAEDGTRTQGSPRAGFAERQPDSSLSPVSNLTSACERSMVTSPAIRALPLTSVACFMEICSSHCPLHQQH

SEQ ID NO: 645 - DNA, 150 bp, Human
aattctcgagctcgtcgaccggtcgacgagctcgagggtcgacgagctcgagggcgcgcgcccggcccccacccctcgcagcaccccgcgccccgcgccctcccagccgggtccagccggagccatggggccggagccgcagtgagcacc

SEQ ID NO: 646 - protein, 50 aa, Human
NSRARRPVDELEGRRARGRAPGPHPSQHPAPRALPAGSSRSHGAGAAVST

SEQ ID NO: 647 - protein, 49 aa, Human
ILELVDRSTSSRVDELEGARPAPTPRSTPRPAPSQPGPAGAMGPEPQAP

SEQ ID NO: 648 - protein, 47 aa, Human
ILELVDRSTSSRVDELEGARPAPTPRSTPRPAPSQPGPAGAMGPEPQ

SEQ ID NO: 649 - protein, 50 aa, Human
FSSSSTGRRARGSTSSRARARPPPLAAPRAPRPPSRVQPEPWGRSRSEHH

SEQ ID NO: 650 - DNA, 424 bp, Human
cctactctattcagatattctccagattcctaaagattagagatcatttctcattctcctaggagtactcacttcaggaagcaaccagataaaagagaggtgcaacggaagccagaacattcctcctggaaattcaacctgtttcgcagtttctcgaggaatcagcattcagtcaatccgggccgggagcagtcatctgtggtgaggctgattggctgggcaggaacagcgccggggcgtgggctgagcacagcgcttcgctctctttgccacaggaagcctgagctcattcgagtagcggctcttccaagctcaaagaagcagaggccgctgttcgtttcctttaggtctttccactaaagtcggagtatcttcttccaagatttcacgtcttggtggccgttccaaggagcgcgaggtcggg

SEQ ID NO: 651 - protein, 136 aa, Human [sequence omitted]

SEQ ID NO: 652 - protein, 12 aa, Human
LLYSDILQIPKD

SEQ ID NO: 653 - protein, 54 aa, Human
RSFLILLGVLTSGSNQIKERCNGSQNIPPGNSTCFAVSRGISIQSIRAGSSHLW

SEQ ID NO: 654 - protein, 11 aa, Human
LAGQEQRRGVG

SEQ ID NO: 655 - protein, 16 aa, Human
AQRFALFATGSLSSFE

SEQ ID NO: 656 - protein, 42 aa, Human
RLFQAQRSRGRCSFPLGLSTKVGVSSSKISRLGGRSKEREVG

SEQ ID NO: 657 - protein, 137 aa, Human [sequence omitted]

SEQ ID NO: 658 - protein, 19 aa, Human
YSIQIFSRFLKIRDHFSFS

SEQ ID NO: 659 - protein, 9 aa, Human
EYSLQEATR

SEQ ID NO: 660 - protein, 63 aa, Human
KRGATEARTFLLEIQPVSQFLEESAFSQSGPGAVICGEADWLGRNSAGAWAEHSASLSLPQEA

SEQ ID NO: 661 - protein, 20 aa, Human
AHSSSGSSKLKEAEAAVRFL

SEQ ID NO: 662 - protein, 26 aa, Human
VFPLKSEYLLPRFHVLVAVPRSARSG

SEQ ID NO: 663 - protein, 140 aa, Human [sequence omitted]

SEQ ID NO: 664 - protein, 10 aa, Human
PTLFRYSPDS

SEQ ID NO: 665 - protein, 108 aa, Human
RLEIISHSPRSTHFRKQPDKREVQRKPEHSSWKFNLFRSFSRNQHSVNPGREQSSVVRLIGWAGTAPGRGLSTALRSLCHRKPELIRVAALPSSKKQRPLFVSFRSFH

SEQ ID NO: 666 - protein, 22 aa, Human
SRSIFFQDFTSWWPFQGARGRD

SEQ ID NO: 667 - DNA, 121 bp, Human
gtccaggagcaggtagctgctgggctccggggacactttgcgttcgggctgggagcgtgctttccacgacggtgacacgcttccctggattggcagccagactgccttccgggtcactgcc

SEQ ID NO: 668 - protein, 40 aa, Human
  VARIANT (1)...(40): Xaa = Any Amino Acid
XSRSRLLGSGDTLRSGWERAFHDGDTLPWIGSQTAFRVTA

SEQ ID NO: 669 - protein, 35 aa, Human
LLGSGDTLRSGWERAFHDGDTLPWIGSQTAFRVTA

SEQ ID NO: 670 - protein, 40 aa, Human
PGAGSCWAPGTLCVRAGSVLSTTVTRFPGLAARLPSGSLP

SEQ ID NO: 671 - protein, 40 aa, Human [sequence omitted]

SEQ ID NO: 672 - protein, 24 aa, Human
VQEQVAAGLRGHFAFGLGACFPRR

SEQ ID NO: 673 - protein, 16 aa, Human
HASLDWQPDCLPGHCH

SEQ ID NO: 674 - DNA, 235 bp, Human
gcttcagggtacagctcccccgcagccagaagccgggcctgcagcccctcagcaccgctccgggacaccccacccgcttcccaggcgtgacctgtcaacagcaacttcgcggtgtggtgaactctctgaggaaaaaccattttgattattactctcagacgtgcgtggcaacaagtgactgagacctagaaatccaagcgttggaggtcctgaggccagcctaagtcgcttcaaa

SEQ ID NO: 675 - protein, 76 aa, Human [sequence omitted]

SEQ ID NO: 676 - protein, 47 aa, Human
LQGTAPPQPEAGPAAPQHRSGTPHPLPRRDLSTATSRCGELSEEKPF

SEQ ID NO: 677 - protein, 10 aa, Human
LLLSDVRGNK

SEQ ID NO: 678 - protein, 19 aa, Human
LRPRNPSVGGPEASLSRFK

SEQ ID NO: 679 - protein, 76 aa, Human [sequence omitted]

SEQ ID NO: 680 - protein, 59 aa, Human
FRVQLPRSQKPGLQPLSTAPGHPTRFPGVTCQQQLRGVVNSLRKNHFDYYSQTCVATSD

SEQ ID NO: 681 - protein, 13 aa, Human
DLEIQALEVLRPA

SEQ ID NO: 682 - protein, 74 aa, Human [sequence omitted]

SEQ ID NO: 683 - protein, 29 aa, Human
ASGYSSPAARSRACSPSAPLRDTPPASQA

SEQ ID NO: 684 - protein, 9 aa, Human
PVNSNFAVW

SEQ ID NO: 685 - protein, 19 aa, Human
GKTILIITLRRAWQQVTET

SEQ ID NO: 686 - DNA, 261 bp, Human
ctcaaaaggggccggatttccttctcctggaggcagatgttgcctctctctctcgctcggattggttcagtgcactctagaaacactgctgtggtggagaaactggaccccaggtctggagcgaattccagcctgcagggctgataagcgaggcattagtgagattgagagagactttaccccgccgtggtggttggagggcgcgcagtagagcagcagcacaggcgcgggtcccgggaggccggctctgctcgcgccgag

SEQ ID NO: 687 - protein, 82 aa, Human [sequence omitted]

SEQ ID NO: 688 - protein, 47 aa, Human
LKRGRISFSWRQMLPLSLARIGSVHSRNTAVVEKLDPRSGANSSLQG

SEQ ID NO: 689 - protein, 31 aa, Human
ERLYPAVVVGGRAVEQQHRRGSREAGSARAE

SEQ ID NO: 690 - protein, 86 aa, Human
SKGAGFPSPGGRCCLSLSLGLVQCTLETLLWWRNWTPGLERIPACRADKRGISEIERDFTPPWWLEGAQSSSTGAGPGRPALLAPR

SEQ ID NO: 691 - protein, 69 aa, Human
SKGAGFPSPGGRCCLSLSLGLVQCTLETLLWWRNWTPGLERIPACRADKRGISEIERDFTPPWWLEGAQ

SEQ ID NO: 692 - protein, 17 aa, Human
SSSTGAGPGRPALLAPR

SEQ ID NO: 693 - protein, 86 aa, Human
QKGPDFLLLEADVASLSRSDWFSALKHCCGGETGPQVWSEFQPAGLISEALVRLRETLPRRGGWRARSRAAAQARVPGGRLCSRRD

SEQ ID NO: 694 - protein, 25 aa, Human
QKGPDFLLLEADVASLSRSDWFSAL

SEQ ID NO: 695 - protein, 61 aa, Human
KHCCGGETGPQVWSEFQPAGLISEALVRLRETLPRRGGWRARSRAAAQARVPGGRLCSRRD

SEQ ID NO: 696 - DNA, 233 bp, Human
cgcagcctccaaagccgccttcctcagggaaatttgcgtgaccttactgccctccgtctacaggccttgtacctctccaggccgatttttccacaatttaaatcccagttcacctggtatccagctccagcaacttagagcgtttcacgtcacgccgggcgccaggcgtcggcttgtataacctgaaaacgctcctgtttttctcatctgtgcagtgggttttgattcccacc

SEQ ID NO: 697 - protein, 75 aa, Human [sequence omitted]

SEQ ID NO: 698 - protein, 12 aa, Human
QPPKPPSSGKFA

SEQ ID NO: 699 - protein, 19 aa, Human
PYCPPSTGLVPLQADFSTI

SEQ ID NO: 700 - protein, 44 aa, Human
IPVHLVSSSSNLERFTSRRAPGVGLYNLKTLLFFSSVQWVLIPT

SEQ ID NO: 701 - protein, 75 aa, Human [sequence omitted]

SEQ ID NO: 702 - protein, 45 aa, Human
RSLQSRLPQGNLRDLTALRLQALYLSRPIFPQFKSQFTWYPAPAT

SEQ ID NO: 703 - protein, 15 aa, Human
SVSRHAGRQASACIT

SEQ ID NO: 704 - protein, 12 aa, Human
KRSCFSHLCSGF

SEQ ID NO: 705 - protein, 77 aa, Human
AASKAAFLREICVTLLPSVYRPCTSPGRFFHNLNPSSPGIQLQQLRAFHVTPGARRRLVPENAPVFLICAVGFDSHH

SEQ ID NO: 706 - protein, 59 aa, Human
AASKAAFLREICVTLLPSVYRPCTSPGRFFHNLNPSSPGIQLQQLRAFHVTPGARRRLV

SEQ ID NO: 707 - protein, 18 aa, Human
PENAPVFLICAVGFDSHH

SEQ ID NO: 708 - DNA, 172 bp, Human
ggcacgagagcttacagcctgagaagagcgtctcgcccgggagcggcggcggccatcgagacccaaccccaaggcgcgtccccctcggcctcccagcgctcccaagccgcagcggccgcgccccttcagctagctcgctcgctcgctctgcttccctgctgccggctgcgcc

SEQ ID NO: 709 - protein, 55 aa, Human [sequence omitted]

SEQ ID NO: 710 - protein, 36 aa, Human
EERLARERRRPSRPNPKARPPRPPSAPKPQRPRPFS

SEQ ID NO: 711 - protein, 13 aa, Human
LARSLCFPAAGCA

SEQ ID NO: 712 - protein, 57 aa, Human [sequence omitted]

SEQ ID NO: 713 - protein, 58 aa, Human [sequence omitted]

SEQ ID NO: 714 - DNA, 55 bp, Human
gcagcgctgcgtcctgctgcgcacgtgggaagccctggccccggccacccccgcg

SEQ ID NO: 715 - protein, 18 aa, Human
QRCVLLRTWEALAPATPA

SEQ ID NO: 716 - protein, 18 aa, Human
SAASCCARGKPWPRPPPR

SEQ ID NO: 717 - protein, 19 aa, Human
AALRPAAHVGSPGPGHPRD

SEQ ID NO: 718 - DNA, 43 bp, Human
aagaaaatcctgcttgacaaaaaccgtcacttaggaaaagatg

SEQ ID NO: 719 - protein, 13 aa, Human
RKSCLTKTVTEKM

SEQ ID NO: 720 - protein, 10 aa, Human
RKSCLTKTVT

SEQ ID NO: 721 - protein, 12 aa, Human
ENPAQKPSLRKR

SEQ ID NO: 722 - protein, 14 aa, Human
KKILLDKNRHLGKD

SEQ ID NO: 723 - DNA, 390 bp, Human
ggggtaaggagttcaaggcagcgcccacacccgggggctctccgcaacccgaccgcctgtccgctcccccacttcccgccctccctcccacctactcattcacccacccacccacccagagccgggacggcagcccaggcgcccgggccccgccgtctcctcgccgcgatcctggacttcctcttgctgcaggacccggcttccacgtgtgtcccggagccggcgtctcagcacacgctccgctccgggcctgggtgcctacagcagccagagcagcagggagtccgggacccgggcggcatctgggccaagttaggcgccgccgaggccagcgctgaacgtctccagggccggaggagccgcggggcgtccgggtctgagcctcagcaa

SEQ ID NO: 724 - protein, 130 aa, Human
GVRSSRQRPHPGALRNPTACPLPHFPPSLPPTHSPTHPPRAGTAAQAPGPRRLLAAILDFLLLQDPASTCVPEPASQHTLRSGPGCLQQPEQQGVRDPGGIWAKLGAAEASAERLQGRRSRGASGSEPQQ

SEQ ID NO: 725 - protein, 129 aa, Human
  VARIANT (1)...(129): Xaa = Any Amino Acid
XGGVQGSAHTRGLSATRPPVRSPTSRPPSHLLIHPPTHPEPGRQPRRPGPAVSSPRSWTSSCCRTRLPRVSRSRRLSTRSAPGLGAYSSQSSRESGTRAASGPSAPPRPALNVSRAGGAAGRPGLSLSK

SEQ ID NO: 726 - protein, 102 aa, Human
GVQGSAHTRGLSATRPPVRSPTSRPPSHLLIHPPTHPEPGRQPRRPGPAVSSPRSWTSSCCRTRLPRVSRSRRLSTRSAPGLGAYSSQSSRESGTRAASGPS

SEQ ID NO: 727 - protein, 25 aa, Human
APPRPALNVSRAGGAAGRPGLSLSK

SEQ ID NO: 728 - protein, 128 aa, Human [sequence omitted]

SEQ ID NO: 729 - protein, 111 aa, Human
GKEFKAAPTPGGSPQPDRLSAPPLPALPPTYSFTHPPTQSRDGSPGARAPPSPRRDPGLPLAAGPGFHVCPGAGVSAHAPLRAWVPTAARAAGSPGPGRHLGQVRRRRGQR

SEQ ID NO: 730 - protein, 13 aa, Human
TSPGPEEPRGVRV

SEQ ID NO: 731 - DNA, 35937 bp, Adeno Virus
catcatcataatataccttattttggattgaagccaatatgataatgagggggtggagtttgtgacgtggcgcggggcgtgggaacggggcgggtgacgtagtagtgtggcggaagtgtgatgttgcaagtgtggcggaacacatgtaagcgccggatgtggtaaaagtgacgtttttggtgtgcgccggtgtatacgggaagtgacaattttcgcgcggttttaggcggatgttgtagtaaatttgggcgtaaccaagtaatgtttggccattttcgcgggaaaactgaataagaggaagtgaaatctgaataattctgtgttactcatagcgcgtaatatttgtctagggccgcggggactttgaccgtttacgtggagactcgcccaggtgtttttctcaggtgttttccgcgttccgggtcaaagttggcgttttattattatagtcagctgacgcgcagtgtatttatacccggtgagttcctcaagaggccactcttgagtgccagcgagtagagttttctcctccgagccgctccgacaccgggactgaaaatgagacatattatctgccacggaggtgttattaccgaagaaatggccgccagtcttttggaccagctgatcgaagaggtactggctgataatcttccacctcctagccattttgaaccacctacccttcacgaactgtatgatttagacgtgacggcccccgaagatcccaacgaggaggcggtttcgcagatttttcccgagtctgtaatgttggcggtgcaggaagggattgacttattcacttttccgccggcgcccggttctccggagccgcctcacctttcccggcagcccgagcagccggagcagagagccttgggtccggtttctatgccaaaccttgtgccggaggtgatcgatcttacctgccacgaggctggctttccacccagtgacgacgaggatgaagagggtgaggagtttgtgttagattatgtggagcaccccgggcacggttgcaggtcttgtcattatcaccggaggaatacgggggacccagatattatgtgttcgctttgctatatgaggacctgtggcatgtttgtctacagtaagtgaaaattatgggcagtcggtgatagagtggtgggtttggtgtggtaatttttttttaatttttacagttttgtggtttaaagaattttgtattgtgattttttaaaaggtcctgtgtctgaacctgagcctgagcccgagccagaaccggagcctgcaagacctacccggcgtcctaaattggtgcctgctatcctgagacgcccgacatcacctgtgtctagagaatgcaatagtagtacggatagctgtgactccggtccttctaacacacctcctgagatacacccggtggtcccgctgtgccccattaaaccagttgccgtgagagttggtgggcgtcgccaggctgtggaatgtatcgaggacttgcttaacgagtctgggcaacctttggacttgagctgtaaacgccccaggccataaggtgtaaacctgtgattgcgtgtgtggttaacgcctttgtttgctgaatgagttgatgtaagtttaataaagggtgagataatgtttaacttgcatggcgtgttaaatggggcggggcttaaagggtatataatgcgccgtgggctaatcttggttacatctgacctcatggaggcttgggagtgtttggaagatttttctgctgtgcgtaacttgctggaacagagctctaacagtacctcttggttttggaggtttctgtggggctcctcccaggcaaagttagtctgcagaattaaggaggattacaagtgggaatttgaagagcttttgaaatcctgtggtgagctgtttgattctttgaatctgggtcaccaggcgcttttccaagagaaggtcatcaagactttggatttttccacaccggggcgcgctgcggctgctgttgcttttttgagttttataaaggataaatggagcgaagaaacccatctgagcggggggtacctgctggattttctggccatgcatctgtggagagcggtggtgagacacaagaatcgcctgctactgttgtcttccgtccgcccggcaataataccgacggaggagcaacagcaggaggaagccaggcggcggcggcggcaggagcagagcccatggaacccgagagccggcctggaccctcgggaatgaatgttgtacaggtggctgaactgtttccagaactgagacgcattttaaccattaacgaggatgggcaggggctaaagggggtaaagagggagcggggggcttctgaggctacagaggaggctaggaatctaacttttagcttaatgaccagacaccgtcctgagtgtgttacttttcagcagattaaggataattgcgctaatgagcttgatctgctggcgcagaagtattccatagagcagctgaccacttactggctgcagccaggggatgattttgaggaggctattagggtatatgcaaaggtggcacttaggccagattgcaagtacaagattagcaaacttgtaaatatcaggaattgttgctacatttctgggaacggggccgaggtggagatagatacggaggatagggtggcctttagatgtagcatgataaatatgtggccgggggtgcttggcatggacggggtggttattatgaatgtgaggtttactggtcccaattttagcggtacggttttcctggccaataccaatcttatcctacacggtgtaagcttctatgggtttaacaatacctgtgtggaagcctggaccgatgtaagggttcggggctgtgccttttactgctgctggaagggggtggtgtgtcgccccaaaagcagggcttcaattaagaaatgcctgtttgaaaggtgtaccttgggtatcctgtctgagggtaactccagggtgcgccacaatgtggcctccgactgtggttgcttcatgctagtgaaaagcgtggctgtgattaagcataacatggtgtgtggcaactgcgaggacagggcctctcagatgctgacctgctcggacggcaactgtcacttgctgaagaccattcacgtagccagccactctcgcaaggcctggccagtgtttgagcacaacatactgacccgctgttccttgcatttgggtaacaggaggggggtgttcctaccttaccaatgcaatttgagtcacactaagatattgcttgagcccgagagcatgtccaaggtgaacctgaacggggtgtttgacatgaccatgaagatctggaaggtgctgaggtacgatgagacccgcaccaggtgcagaccctgcgagtgtggcggtaaacatattaggaaccagcctgtgatgctggatgtgaccgaggagctgaggcccgatcacttggtgctggcctgcacccgcgctgagtttggctctagcgatgaagatacagattgaggtactgaaatgtgtgggcgtggcttaagggtgggaaagaatatataaggtgggggtctcatgtagttttgtatctgttttgcagcagccgccgccatgagcgccaactcgtttgatggaagcattgtgagctcatatttgacaacgcgcatgcccccatgggccggggtgcgtcagaatgtgatgggctccagcattgatggtcgccccgtcctgcccgcaaactctactaccttgacctacgagaccgtgtctggaacgccgttggagactgcagcctccgccgccgcttcagccgctgcagccaccgcccgcgggattgtgactgactttgctttcctgagcccgcttgcaagcagtgcagcttcccgttcatccgcccgcgatgacaagttgacggctcttttggcacaattggattctttgacccgggaacttaatgtcgtttctcagcagctgttggatctgcgccagcaggtttctgccctgaaggcttcctcccctcccaatgcggtttaaaacataaataaaaaccagactctgtttggattttgatcaagcaagtgtcttgctgtctttatttaggggttttgcgcgcgcggtaggcccgggaccagcggtctcggtcgttgagggtcctgtgtattttttccaggacgtggtaaaggtgactctggatgttcagatacatgggcataagcccgtctctggggtggaggtagcaccactgcagagcttcatgctgcggggtggtgttgtagatgatccagtcgtagcaggagcgctgggcgtggtgcctaaaaatgtctttcagtagcaagctgattgccaggggcaggcccttggtgtaagtgtttacaaagcggttaagctgggatgggtgcatacgtggggatatgagatgcatcttggactgtatttttaggttggctatgttcccagccatatccctccggggattcatgttgtgcagaaccaccagcacagtgtatccggtgcacttgggaaatttgtcatgtagcttagaaggaaatgcgtggaagaacttggagacgcccttgtgacctccgagattttccatgcattcgtccataatgatggcaatgggcccacgggcggcggcctgggcgaagatatttctgggatcactaacgtcatagttgtgttccaggatgagatcgtcataggccatttttacaaagcgcgggcggagggtgccagactgcggtataatggttccatccggcccaggggcgtagttaccctcacagatttgcatttcccacgctttgagttcagatggggggatcatgtctacctgcggggcgatgaagaaaaccgtttccggggtaggggagatcagctgggaagaaagcaggttcctgagcagctgcgacttaccgcagccggtgggcccgtaaatcacacctattaccggctgcaactggtagttaagagagctgcagctgccgtcatccctgagcaggggggccacttcgttaagcatgtccctgacttgcatgttttccctgaccaaatgcgccagaaggcgctcgccgcccagcgatagcagttcttgcaaggaagcaaagtttttcaacggtttgaggccgtccgccgtaggcatgcttttgagcgtttgaccaagcagttccaggcggtcccacagctcggtcacgtgctctacggcatctcgatccagcatatctcctcgtttcgcgggttggggcggctttcgctgtacggcagtagtcggtgctcgtccagacgggccagggtcatgtctttccacgggcgcagggtcctcgtcagcgtagtctgggtcacggtgaaggggtgcgctccgggctgcgcgctggccagggtgcgcttgaggctggtcctgctggtgctgaagcgctgccggtcttcgccctgcgcgtcggccaggtagcatttgaccatggtgtcatagtccagcccctccgcggcgtggcccttggcgcgcagcttgcccttggaggaggcgccgcacgaggggcagtgcagacttttaagggcgtagagcttgggcgcgagaaataccgattccggggagtaggcatccgcgccgcaggccccgcagacggtctcgcattccacgagccaggtgagctctggccgttcggggtcaaaaaccaggtttcccccatgctttttgatgcgtttcttacctctggtttccatgagccggtgtccacgctcggtgacgaaaaggctgtccgtgtccccgtatacagacttgagaggcctgtcctcgagcggtgttccgcggtcctcctcgtatagaaactcggaccactctgagacgaaggctcgcgtccaggccagcacgaaggaggctaagtgggaggggtagcggtcgttgtccactagggggtccactcgctccagggtgtgaagacacatgtcgccctcttcggcatcaaggaaggtgattggtttataggtgtaggccacgtgaccgggtgttcctgaaggggggctataaaagggggtgggggcgcgttcgtcctcactctcttccgcatcgctgtctgcgagggccagctgttggggtgagtactccctctcaaaagcgggcatgacttctgcgctaagattgtcagtttccaaaaacgaggaggatttgatattcacctggcccgcggtgatgcctttgagggtggccgcgtccatctggtcagaaaagacaatctttttgttgtcaagcttggtggcaaacgacccgtagagggcgttggacagcaacttggcgatggagcgcagggtttggtttttgtcgcgatcggcgcgctccttggccgcgatgtttagctgcacgtattcgcgcgcaacgcaccgccattcgggaaagacggtggtgcgctcgtcgggcaccaggtgcacgcgccaaccgcggttgtgcagggtgacaaggtcaacgctggtggctacctctccgcgtaggcgctcgttggtccagcagaggcggccgcccttgcgcgaacagaatggcggtagtgggtctagctgcgtctcgtccggggggtctgcgtccacggtaaagaccccgggcagcaggcgcgcgtcgaagtagtctatcttgcatccttgcaagtctagcgcctgctgccatgcgcgggcggcaagcgcgcgctcgtatgggttgagtgggggaccccatggcatggggtgggtgagcgcggaggcgtacatgccgcaaatgtcgtaaacgtagaggggctctctgagtattccaagatatgtagggtagcatcttccaccgcggatgctggcgcgcacgtaatcgtatagttcgtgcgagggagcgaggaggtcgggaccgaggttgctacgggcgggctgctctgctcggaagactatctgcctgaagatggcatgtgagttggatgatatggttggacgctggaagacgttgaagctggcgtctgtgagacctaccgcgtcacgcacgaaggaggcgtaggagtcgcgcagcttgttgaccagctcggcggtgacctgcacgtctagggcgcagtagtccagggtttccttgatgatgtcatacttatcctgtcccttttttttccacagctcgcggttgaggacaaactcttcgcggtctttccagtactcttggatcggaaacccgtcggcctccgaacggtaagagcctagcatgtagaactggttgacggcctggtaggcgcagcatcccttttctacgggtagcgcgtatgcctgcgcggccttccggagcgaggtgtgggtgagcgcaaaggtgtccctaaccatgactttgaggtactggtatttgaagtcagtgtcgtcgcatccgccctgctcccagagcaaaaagtccgtgcgctttttggaacgcgggtttggcagggcgaaggtgacatcgttgaaaagtatctttcccgcgcgaggcataaagttgcgtgtgatgcggaagggtcccggcacctcggaacggttgttaattacctgggcggcgagcacgatctcgtcgaagccgttgatgttgtggcccacgatgtaaagttccaagaagcgcggggtgcccttgatggagggcaattttttaagttcctcgtaggtgagctcctcaggggagctgagcccgtgttctgacagggcccagtctgcaagatgagggttggaagcgacgaatgagctccacaggtcacgggccattagcatttgcaggtggtcgcgaaaggtcctaaactggcgacctatggccattttttctggggtgatgcagtagaaggtaagcgggtcttgttcccagcggtcccatccaaggtccacggctaggtctcgcgcggcggtcaccagaggctcatctccgccgaacttcataaccagcatgaagggcacgagctgcttcccaaaggcccccatccaagtataggtctctacatcgtaggtgacaaagagacgctcggtgcgaggatgcgagccgatcgggaagaactggatctcccgccaccagttggaggagtggctgttgatgtggtgaaagtagaagtccctgcgacgggccgaacactcgtgctggcttttgtaaaaacgtgcgcagtactggcagcggtgcacgggctgtacatcctgcacgaggttgacctgacgaccgcgcacaaggaagcagagtgggaatttgagcccctcgcctggcgggtttggctggtggtcttctacttcggctgcttgtccttgaccgtctggctgctcgaggggagttatggtggatcggaccaccacgccgcgcgagcccaaagtccagatgtccgcgcgcggcggtcggagcttgatgacaacatcgcgcagatgggagctgtccatggtctggagctcccgcggcgacaggtcaggcgggagctcctgcaggtttacctcgcatagccgggtcagggcgcgggctaggtccaggtgatacctgatttccaggggctggttggtggcggcgtcgatgacttgcaagaggccgcatccccgcggcgcgactacggtaccgcgcggcgggcggtgggccgcgggggtgtccttggatgatgcatctaaaagcggtgacgcgggcgggcccccggaggtagggggggctcgggacccgccgggagagggggcaggggcacgtcggcgccgcgcgcgggcaggagctggtgctgcgcgcggaggttgctggcgaacgcgacgacgcggcggttgatctcctgaatctggcgcctctgcgtgaagacgacgggcccggtgagcttgaacctgaaagagagttcgacagaatcaatttcggtgtcgttgacggcggcctggcgcaaaatctcctgcacgtctcctgagttgtcttgataggcgatttcggccatgaactgctcgatctcttcctcctggagatctccgcgtccggctcgctccacggtggcggcgaggtcgttggagatgcgggccatgagctgcgagaaggcgttgaggcctccctcgttccagacgcggctgtagaccacgcccccttcggcatcgcgggcgcgcatgaccacctgcgcgagattgagctccacgtgccgggcgaagacggcgtagtttcgcaggcgctgaaagaggtagttgagggtggtggcggtgtgttctgccacgaagaagtacataacccagcgtcgcaacgtggattcgttgatatcccccaaggcctcaaggcgctccatggcctcgtagaagtccacggcgaagttgaaaaactgggagttgcgcgccgacacggttaactcctcctccagaagacggatgagctcggcgacagtgtcgcgcacctcgcgctcaaaggctacaggggcctcttcttcttcaatctcctcttccataagggcctccccttcttcttcttcttctggcggcggtgggggaggggggacacggcggcgacgacggcgcaccgggaggcggtcgacaaagcgctcgatcatctccccgcggcgacggcgcatggtctcggtgacggcgcggccgttctcgcgggggcgcagttggaagacgccgcccgtcatgtcccggttatgggttggcggggggctgccgtgcggcagggatacggcgctaacgatgcatctcaacaattgttgtgtaggtactccgccaccgagggacctgagcgagtccgcatcgaccggatcggaaaacctctcgagaaaggcgtctaaccagtcacagtcgcaaggtaggctgagcaccgtggcgggcggcagcgggtggcggtcggggttgtttctggcggaggtgctgctgatgatgtaattaaagtaggcggtcttgagacggcggatggtcgacagaagcaccatgtccttgggtccggcctgctgaatgcgcaggcggtcggccatgccccaggcttcgttttgacatcggcgcaggtctttgtagtagtcttgcatgagcctttctaccggcacttcttcttctccttcctcttgtcctgcatctcttgcatctatcgctacggcggcggcggagtttggccgtaggtggcgccctcttcctcccatgcgtgtgaccccgaagcccctcatcggctgaagcagggccaggtcggcgacaacgcgctcggctaatatggcctgctgcacctgcgtgagggtagactggaagtcatccatgtccacaaagcggtggtatgcgcccgtgttgatggtgtaagtgcagttggccataacggaccagttaacggtctggtgacccggctgcgagagctcggtgtacctgagacgcgagtaagcccttgagtcaaagacgtagtcgttgcaagtccgcaccaggtactgatatcccaccaaaaagtgcggcggcggctggcggtagaggggccagcgtagggtggccggggctccgggggcgaggtcttccaacataaggcgatgatatccgtagatgtacctggacatccaggtgatgccggcggcggtggtggaggcgcgcggaaagtcgcggacgcggttccagatgttgcgcagcggcaaaaagtgctccatggtcgggacgctctggccggtgaggcgtgcgcagtcgttgacgctctagaccgtgcaaaaggagagcctgtaagcgggcactcttccgtggtctggtggataaattcgcaagggtatcatggcggacgaccggggttcgaaccccggatccggccgtccgccgtgatccatgcggttaccgcccgcgtgtcgaacccaggtgtgcgacgtcagacaacgggggagcgctccttttggcttccttccaggcgcggcggctgctgcgctagcttttttggccactggccgcgcgcggcgtaagcggttaggctggaaagcgaaagcattaagtggctcgctccctgtagccggagggttattttccaagggttgagtcgcaggacccccggttcgagtctcgggccggccggactgcggcgaacgggggtttgcctccccgtcatgcaagaccccgcttgcaaattcctccggaaacagggacgagccccttttttgcttttcccagatgcatccggtgctgcggcagatgcgcccccctcctcagcagcggcaagagcaagagcagcggcagacatgcagggcaccctccccttctcctaccgcgtcaggaggggcaacatccgcggctgacgcggcggcagatggtgattacgaacccccgcggcgccgggcccggcactacctggacttggaggagggcgagggcctggcgcggctaggagcgccctctcctgagcgacacccaagggtgcagctgaagcgtgacacgcgcgaggcgtacgtgccgcggcagaacctgtttcgcgaccgcgagggagaggagcccgaggagatgcgggatcgaaagttccacgcagggcgcgagttgcggcatggcctgaaccgcgagcggttgctgcgcgaggaggactttgagcccgacgcgcggaccgggattagtcccgcgcgcgcacacgtggcggccgccgacctggtaaccgcgtacgagcagacggtgaaccaggagattaactttcaaaaaagctttaacaaccacgtgcgcacgcttgtggcgcgcgaggaggtggctataggactgatgcatctgtgggactttgtaagcgcgctggagcaaaacccaaatagcaagccgctcatggcgcagctgttccttatagtgcagcacagcagggacaacgaggcattcagggatgcgctgctaaacatagtagagcccgagggccgctggctgctcgatttgataaacattctgcagagcatagtggtgcaggagcgcagcttgagcctggctgacaaggtggccgccattaactattccatgctcagtctgggcaagttttacgcccgcaagatataccataccccttacgttcccatagacaaggaggtaaagatcgaggggttctacatgcgcatggcgttgaaggtgcttaccttgagcgacgacctgggcgtttatcgcaacgagcgcatccacaaggccgtgagcgtgagccggcggcgcgagctcagcgaccgcgagctgatgcacagcctgcaaagggccctggctggcacgggcagcggcgatagagaggccgagtcctactttgacgcgggcgctgacctgcgctgggccccaagccgacgcgccctggaggcagctggggccggacctgggctggcggtggcacccgcgcgcgctggcaacgtcggcggcgtggaggaatatgacgaggacgatgagtacgagccagaggacggcgagtactaagcggtgatgtttctgatcagatgatgcaagacgcaacggacccggcggtgcgggcggcgctgcagagccagccgtccggccttaactccacggacgactggcgccaggtcatggaccgcatcatgtcgctgactgcgcgtaaccctgacgcgttccggcagcagccgcaggccaaccggctctccgcaattctggaagcggtggtcccggcgcgcgcaaaccccacgcacgagaaggtgctggcgatcgtaaacgcgctggccgaaaacagggccatccggcccgatgaggccggcctggtctacgacgcgctgcttcagcgcgtggctcgttacaacagcggcaacgtgcagaccaacctggaccggctggtgggggatgtgcgcgaggccgtggcgcagcgtgagcgcgcgcagcagcagggcaacctgggctccatggttgcactaaacgccttcctgagtacacagcccgccaacgtgccgcggggacaggaggactacaccaactttgtgagcgcactgcggctaatggtgactgagacaccgcaaagtgaggtgtaccagtccgggccagactattttttccagaccagtagacaaggcctgcagaccgtaaacctgagccaggctttcaagaacttgcaggggctgtggggggtgcgggctcccacaggcgaccgcgcgaccgtgtctagcttgctgacgcccaactcgcgcctgttgctgctgctaatagcgcccttcacggacagtggcagcgtgtcccgggacacatacctaggtcacttgctgacactgtaccgcgaggccataggtcaggcgcatgtggacgagcatactttccaggagattacaagtgtcagccgcgcgctggggcaggaggacacgggcagcctggaggcaaccctgaactacctgctgaccaaccggcggcagaagatcccctcgttgcacagtttaaacagcgaggaggagcgcatcttgcgctatgtgcagcagagcgtgagccttaacctgatgcgcgacggggtaacgcccagcgtggcgctggacatgaccgcgcgcaacatggaaccgggcatgtatgcctcaaaccggccgtttatcaatcgcctaatggactacttgcatcgcgcggccgccgtgaaccccgagtatttcaccaatgccatcttgaacccgcactggctaccgccccctggtttctacaccgggggatttgaggtgcccgagggtaacgatggattcctctgggacgacatagacgacagcgtgttttccccgcaaccgcagaccctgctagagttgcaacagcgcgagcaggcagaggcggcgctgcgaaaggaaagcttccgcaggccaagcagcttgtccgatctaggcgctgcggccccgcggtcagatgcgagtagcccatttccaagcttgatagggtcttttaccagcactcgcaccacccgcccgcgcctgctgggcgaggaggagtacctaaacaactcgctgctgcagccgcagcgcgaaaagaacctgcctccggcatttcccaacaacgggatagagagcctagtggacaagatgagtagatggaagacgtatgcgcaggagcacagggatgtgcccggcccgcgcccgcccacccgtcgtcaaaggcacgaccgtcagcggggtctggtgtgggaggacgatgactcggcagacgacagcagcgtcctggatttgggagggagtggcaacccgtttgcgcaccttcgccccaggctggggagaatgttttaaaaaaaaaaaaaaaaagcatgatgcaaaataaaaaactcaccaaggccatggcaccgagcgttggttttcttgtattccccttagtatgcagcgcgcggcgatgtatgaggaaggtcctcctccctcctacgagagcgtggtgagcgcggcgccagtggcggcggcgctgggttcccccttcgatgctcccctggacccgccgtttgtgcctccgcggtacctgcggcctaccggggggagaaacagcatccgttactctgagttggcacccctattcgacaccacccgtgtgtaccttgtggacaacaagtcaacggatgtggcatccctgaactaccagaacgaccacagcaactttctaaccacggtcattcaaaacaatgactacagcccgggggaggcaagcacacagaccatcaatcttgacgaccgttcgcactggggcggcgacctgaaaaccatcctgcataccaacatgccaaatgtgaacgagttcatgtttaccaataagtttaaggcgcgggtgatggtgtcgcgctcgcttactaaggacaaacaggtggagctgaaatatgagtgggtggagttcacgctgcccgagggcaactactccgagaccatgaccatagaccttatgaacaacgcgatcgtggagcactacttgaaagtgggcaggcagaacggggttctggaaagcgacatcggggtaaagtttgacacccgcaacttcagactggggtttgacccagtcactggtcttgtcatgcctggggtatatacaaacgaagccttccatccagacatcattttgctgccaggatgcggggtggacttcacccacagccgcctgagcaacttgttgggcatccgcaagcggcaacccttccaggagggctttaggatcacctacgatgacctggagggtggtaacattcccgcactgttggatgtggacgcctaccaggcaagcttaaaagatgacaccgaacagggcggggatggcgcaggcggcggcaacaacagtggcagcggcgcggaagagaactccaacgcggcagccgcggcaatgcagccggtggaggacatgaacgatcatgccattcgcggcgacacctttgccacacgggcggaggagaagcgcgctgaggccgaggcagcggcagaagctgccgcccccgctgcgcaacccgaggtcgagaagcctcagaagaaaccggtgatcaaacccctgacagaggacagcaagaaacgcagttacaacctaataagcaatgacagcaccttcacccagtaccgcagctggtaccttgcatacaactacggcgaccctcagaccgggatccgctcatggaccctcctttgcactcctgacgtaacctgcggctcggagcaggtctactggtcgttgccagacatgatgcaagaccccgtgaccttccgctccacgagccagatcagcaactttccggtggtgggcgccgagctgttgcccgtgcactccaagagcttctacaacgaccaggccgtctactcccagctcatccgccagtttacctctctgacccacgtgttcaatcgctttcccgagaaccagattttggcgcgcccgccagcccccaccatcaccaccgtcagtgaaaacgttcctgctctcacagatcacgggacgctaccgctgcgcaacagcatcggaggagtccagcgagtgaccattactgacgccagacgccgcacctgcccctacgtttacaaggccctgggcatagtctcgccgcgcgtcctatcgagccgcactttttgagcaaacatgtccatccttatatcgcccagcaataacacaggctggggcctgcgcttcccaagcaagatgtttggcggggcaaagaagcgctccgaccaacacccagtgcgcgtgcgcgggcactaccgcgcgccctggggcgcgcacaaacgcggccgcactgggcgcaccaccgtcgatgacgccattgacgcggtggtggaggaggcgcgcaactacacgcccacgccgccaccagtgtccacagtggacgcggccattcagaccgtggtgcgcggagcccggcgttatgctaaaatgaagagacggcggaggcgcgtagcacgtcgccaccgccgccgacccggcactgccgcccaacgcgcggcggcggccctgcttaaccgcgcacgtcgcaccggccgacgggcggccatgcgggccgctcgaaggctggccgcgggtattgtcactgtgccccccaggtccaggcgacgagcggccgccgcagcagccgcggccattagtgctatgactcagggtcgcaggggcaacgtgtactgggtgcgcgactcggttagcggcctgcgcgtgcccgtgcgcacccgccccccgcgcaactagattgcaagaaaaaactacttagactcgtactgttgtatgtatccagcggcggcggcgcgcaacgaagctatgtccaagcgcaaaatcaaagaagagatgctccaggtcatcgcgccggagatctatggccccccgaagaaggaagagcaggattacaagccccgaaagctaaagcgggtcaaaaagaaaaagaaagatgatgatgatgatgaacttgacgacgaggtggaactgctgcacgcaaccgcgcccaggcggcgggtacagtggaaaggtcgacgcgtaagacgtgttttgcgacccggcaccaccgtagtttttacgcccggtgagcgctccacccgcacctacaagcgcgtgtatgatgaggtgtacggcgacgaggacctgcttgagcaggccaacgagcgcctcggggagtttgcctacggaaagcggcataaggacatgttggcgttgccgctggacgagggcaacccaacacctagcctaaagcccgtgacactgcagcaggtgctgcccacgcttgcaccgtccgaagaaaagcgcggcctaaagcgcgagtctggtgacttggcacccaccgtgcagctgatggtacccaagcgccagcgactggaagatgtcttggaaaaaatgaccgtggagcctgggctggagcccgaggtccgcgtgcggccaatcaagcaggtggcaccgggactgggcgtgcagaccgtggacgttcagatacccaccaccagtagcactagtattgccactgccacagagggcatggagacacaaacgtccccggttgcctcggcggtggcagatgccgcggtgcaggcggccgctgcggccgcgtccaaaacctctacggaggtgcaaacggacccgtggatgtttcgcgtttcagccccccggcgcccgcgccgttccaggaagtacggcaccgccagcgcactactgcccgaatatgccctacatccttccatcgcgcctacccccggctatcgtggctacacctaccgccccagaagacgagcgactacccgacgccgaaccaccactggaacccgccgccgccgtcgccgtcgccagcccgtgctggccccgatttccgtgcgcagggtggctcgcgaaggaggcaggaccctggtgctgccaacagcgcgctaccaccccagcatcgtttaaaagccggtctttgtggttcttgcagatatggccctcacctgccgcctccgtttcccggtgccgggattccgaggaagaatgcaccgtaggaggggcatggccggccacggcctgacgggcggcatgcgtcgtgcgcaccaccggcggcggcgcgcgtcgcaccgtcgcatgcgcggcggtatcctgcccctccttattccactgatcgccgcggcgattggcgccgtgcccggaattgcatccgtggccttgcaggcgcagagacactgattaaaaacaagttgcatgtggaaaaatcaaaataaaaagtctggagtctcacgctcgcttggtcctgtaactattttgtagaatggaagacatcaactttgcgtctctggccccgcgacacggctcgcgcccgttcatgggaaactggcaagatatcggcaccagcaatatgagcggtggcgccttcagctggggctcgctgtggagcggcattaaaaatttcggttccaccattaagaactatggcagcaaggcctggaacagcagcacaggccagatgctgagggacaagttgaaagagcaaaatttccaacaaaaggtggtagatggcctggcctctggcattagcggggtggtggacctggccaaccaggcagtgcaaaataagattaacagtaagcttgatccccgccctcccgtagaggagcctccaccggccgtggagacagtgtctccagaggggcgtggcgaaaagcgtccgcggcccgacagggaagaaactctggtgacgcaaatagatgagcctccctcgtacgaggaggcactaaagcaaggcctgcccaccacccgtcccatcgcgcccatggctaccggagtgctgggccagcacacacctgtaacgctggacctgcctccccccgctgacacccagcagaaacctgtgctgccagggccgtccgccgttgttgtaacccgccctagccgcgcgtccctgcgccgtgccgccagcggtccgcgatcgatgcggcccgtagccagtggcaactggcaaagcacactgaacagcatcgtgggtctgggggtgcaatccctgaagcgccgacgatgcttctaaatagctaacgtgtcgtatgtgtcatgtatgcgtccatgtcgccgccagaggagctgctgagccgccgtgcgcccgctttccaagatggctaccccttcgatgatgccgcagtggtcttacatgcacatctcgggccaggacgcctcggagtacctgagccccgggctggtgcagtttgcccgcgccaccgagacgtacttcagcctgaataacaagtttagaaaccccacggtggcacctacgcacgacgtaaccacagaccggtcccagcgtttgacgctgcggttcatccctgtggaccgcgaggataccgcgtactcgtacaaagcgcggttcaccctggctgtgggtgacaaccgtgtgcttgatatggcttccacgtactttgacatccgcggcgtgctggacagggggcctacttttaagccctactccggcactgcctacaacgctctagctcccaagggcgctcctaactcctgtgagtgggaacaaaccgaagatagcggccgggcagttgccgaggatgaagaagaggaagatgaagatgaagaagaggaagaagaagagcaaaacgctcgagatcaggctactaagaaaacacatgtctatgcccaggctcctttgtctggagaaacaattacaaaaagcgggctacaaataggatcagacaatgcagaaacacaagctaaacctgtatacgcagatccttcctatcaaccagaacctcaaattggcgaatctcagtggaacgaagctgatgctaatgcggcaggagggagagtgcttaaaaaaacaactcccatgaaaccatgctatggatcttatgccaggcctacaaatccttttggtggtcaatccgttctggttccggatgaaaaaggggtgcctcttccaaaggttgacttgcaattcttctcaaatactacctctttgaacgaccggcaaggcaatgctactaaaccaaaagtggttttgtacagtgaagatgtaaatatggaaaccccagacacacatctgtcttacaaacctggaaaaggtgatgaaaattctaaagctatgttgggtcaacaatctatgccaaacagacccaattacattgctttcagggacaattttattggcctaatgtattataacagcactggcaacatgggtgttcttgctggtcaggcatcgcagctaaatgccgtggtagatttgcaagacagaaacacagagctgtcctatcaactcttgcttgattccataggtgatagaaccagatatttttctatgtggaatcaggctgtagacagctatgatccagatgttagaatcattgaaaaccatggaactgaggatgaattgccaaattattgttttcctcttgggggtattggggtaactgacacctatcaagctattaaggctaatggcaatggctcaggcgataatggagatactacatggacaaaagatgaaacttttgcaacacgtaatgaaataggagtgggtaacaactttgccatggaaattaacctaaatgccaacctatggagaaatttcctttactccaatattgcgctgtacctgccagacaagctaaaatacaaccccaccaatgtggaaatatctgacaaccccaacacctacgactacatgaacaagcgagtggtggctcccgggcttgtagactgctacattaaccttggggcgcgctggtctctggactacatggacaacgttaatccctttaaccaccaccgcaatgcgggcctccgttatcgctccatgttgttgggaaacggccgctacgtgccctttcacattcaggtgccccaaaagttttttgccattaaaaacctcctcctcctgccaggctcatatacatatgaatggaacttcaggaaggatgttaacatggttctgcagagctctctgggaaacgatcttagagttgacggggctagcattaagtttgacagcatttgtctttacgccaccttcttccccatggcccacaacacggcctccacgctggaagccatgctcagaaatgacaccaacgaccagtcctttaatgactacctttccgccgccaacatgctataccccatacccgccaacgccaccaacgtgcccatctccatcccatcgcgcaactgggcagcatttcgcggttgggccttcacacgcttgaagacaaaggaaaccccttccctgggatcaggctacgacccttactacacctactctggctccataccataccttgacggaaccttctatcttaatcacacctttaagaaggtggccattacctttgactcttctgttagctggccgggcaacgaccgcctgcttactcccaatgagtttgagattaaacgctcagttgacggggagggctacaacgtagctcagtgcaacatgaccaaggactggttcctggtgcagatgttggccaactacaatattggctaccagggcttctacattccagaaagctacaaggaccgcatgtactcgttcttcagaaacttccagcccatgagccggcaagtggttgacgatactaaatacaaggagtatcagcaggttggaattcttcaccagcataacaactcaggattcgtaggctacctcgctcccaccatgcgcgagggacaggcttaccccgccaacgtgccctacccactaataggcaaaaccgcggttgacagtattacccagaaaaagtttctttgcgatcgcaccctttggcgcatcccattctccagtaactttatgtccatgggcgcactcacagacctgggccaaaaccttctctacgccaactccgcccacgcgctagacatgacttttgaggtggatcccatggacgagcccacccttctttatgttttgtttgaagtctttgacgtggtccgtgtgcaccagccgcaccgcggcgtcatcgagaccgtgtacctgcgcacgcccttctcggccggcaacgccacaacataaaagaagcaagcaacatcaacaacagctgccgccatgggctccagtgagcaggaactgaaagccattgtcaaagatcttggttgtgggccatattttttgggcacctatgacaagcgctttccaggctttgtttctccacacaagctcgcctgcgccatagtcaatacggccggtcgcgagactgggggcgtacactggatggcctttgcctggaacccgcgctcaaaaacatgctacctctttgagccctttggcttttctgaccaacgactcaagcaggtttaccagtttgagtacgagtcactcctgcgccgtagcgccattgcttcttcccccgaccgctgtataacgctggaaaagtccacccaaagcgtgcaggggcccaactcggccgcctgtggactattctgctgcatgtttctccacgcctttgccaactggccccaaactcccatggatcacaaccccaccatgaaccttattaccggggtacccaactccatgcttaacagtccccaggtacagcccaccctgcgtcgcaaccaggaacagctctacagcttcctggagcgccactcgccctacttccgcagccacagtgcgcagattaggagcgccacttctttttgtcacttgaaaaacatgtaaaaataatgtactaggagacactttcaataaaggcaaatgtttttatttgtacactctcgggtgattatttaccccccacccttgccgtctgcgccgtttaaaaatcaaaggggttctgccgcgcatcgctatgcgccactggcagggacacgttgcgatactggtgtttagtgctccacttaaactcaggcacaaccatccgcggcagctcggtgaagttttcactccacaggctgcgcaccatcaccaacgcgtttagcaggtcgggcgccgatatcttgaagtcgcagttggggcctccgccctgcgcgcgcgagttgcgatacacagggttgcagcactggaacactatcagcgccgggtggtgcacgctggccagcacgctcttgtcggagatcagatccgcgtccaggtcctccgcgttgctcagggcgaacggagtcaactttggtagctgccttcccaaaaagggtgcatgcccaggctttgagttgcactcgcaccgtagtggcatcagaaggtgaccgtgcccggtctgggcgttaggatacagcgcctgcatgaaagccttgatctgcttaaaagccacctgagcctttgcgccttcagagaagaacatgccgcaagacttgccggaaaactgattggccggacaggccgcgtcatgcacgcagcaccttgcgtcggtgttggagatctgcaccacatttcggccccaccggttcttcacgatcttggccttgctagactgctccttcagcgcgcgctgcccgttttcgctcgtcacatccatttcaatcacgtgctccttatttatcataatgctcccgtgtagacacttaagctcgccttcgatctcagcgcagcggtgcagccacaacgcgcagcccgtgggctcgtggtgcttgtaggttacctctgcaaacgactgcaggtacgcctgcaggaatcgccccatcatcgtcacaaaggtcttgttgctggtgaaggtcagctgcaacccgcggtgctcctcgtttagccaggtcttgcatacggccgccagagcttccacttggtcaggcagtagcttgaagtttgcctttagatcgttatccacgtggtacttgtccatcaacgcgcgcgcagcctccatgcccttctcccacgcagacacgatcggcaggctcagcgggtttatcaccgtgctttcactttccgcttcactggactcttccttttcctcttgcgtccgcataccccgcgccactgggtcgtcttcattcagccgccgcaccgtgcgcttacctcccttgccgtgcttgattagcaccggtgggttgctgaaacccaccatttgtagcgccacatcttctctttcttcctcgctgtccacgatcacctctggggatggcgggcgctcgggcttgggagaggggcgcttctttttctttttggacgcaatggccaaatccgccgtcgaggtcgatggccgcgggctgggtgtgcgcggcaccagcgcatcttgtgacgagtcttcttcgtcctcggactcgagacgccgcctcagccgcttttttgggggcgcgcggggaggcggcggcgacggcgacggggacgacacgtcctccatggttggtggacgtcgcgccgcaccgcgtccgcgctcgggggtggtttcgcgctgctcctcttcccgactggccatttccttctcctataggcagaaaaagatcatggagtcagtcgagaaggaggacagcctaaccgccccctttgagttcgccaccaccgcctccaccgatgccgccaacgcgcctaccaccttccccgtcgaggcacccccgcttgaggaggaggaagtgattatcgagcaggacccaggttttgtaagcgaagacgacgaggatcgctcagtaccaacagaggataaaaagcaagaccaggacgacgcagaggcaaacgaggaacaagtcgggcggggggaccaaaggcatggcgactacctagatgtgggagacgacgtgctgttgaagcatctgcagcgccagtgcgccattatctgcgacgcgttgcaagagcgcagcgatgtgcccctcgccatagcggatgtcagccttgcctacgaacgccacctgttctcaccgcgcgtaccccccaaacgccaagaaaacggcacatgcgagcccaacccgcgcctcaacttctaccccgtatttgccgtgccagaggtgcttgccacctatcacatctttttccaaaactgcaagatacccctatcctgccgtgccaaccgcagccgagcggacaagcagctggccttgcggcagggcgctgtcatacctgatatcgcctcgctcgacgaagtgccaaaaatctttgagggtcttggacgcgacgagaaacgcgcggcaaacgctctgcaacaagaaaacagcgaaaatgaaagtcactgtggagtgctggtggaacttgagggtgacaacgcgcgcctagccgtgctgaaacgcagcatcgaggtcacccactttgcctacccggcacttaacctaccccccaaggttatgagcacagtcatgagcgagctgatcgtgcgccgtgcacgacccctggagagggatgcaaacttgcaagaacaaaccgaggagggcctacccgcagttggcgatgagcagctggcgcgctggcttgagacgcgcgagcctgccgacttggaggagcgacgcaagctaatgatggccgcagtgcttgttaccgtggagcttgagtgcatgcagcggttctttgctgacccggagatgcagcgcaagctagaggaaacgttgcactacacctttcgccagggctacgtgcgccaggcctgcaaaatttccaacgtggagctctgcaacctggtctcctaccttggaattttgcacgaaaaccgcctcgggcaaaacgtgcttcattccacgctcaagggcgaggcgcgccgcgactacgtccgcgactgcgtttacttatttctgtgctacacctggcaaacggccatgggcgtgtggcagcaatgcctggaggagcgcaacctaaaggagctgcagaagctgctaaagcaaaacttgaaggacctatggacggccttcaacgagcgctccgtggccgcgcacctggcggacattatcttccccgaacgcctgcttaaaaccctgcaacagggtctgccagacttcaccagtcaaagcatgttgcaaaactttaggaactttatcctagagcgttcaggaattctgcccgccacctgctgtgcgcttcctagcgactttgtgcccattaagtaccgtgaatgccctccgccgctttggggtcactgctaccttctgcagctagccaactaccttgcctaccactccgacatcatggaagacgtgagcggtgacggcctactggagtgtcactgtcgctgcaacctatgcaccccgcaccgctccctggtctgcaattcgcaactgcttagcgaaagtcaaattatcggtacctttgagctgcagggtccctcgcctgacgaaaagtccgcggctccggggttgaaactcactccggggctgtggacgtcggcttaccttcgcaaatttgtacctgaggactaccacgcccacgagattaggttctacgaagaccaatcccgcccgccaaatgcggagcttaccgcctgcgtcattacccagggccacatccttggccaattgcaagccatcaacaaagcccgccaagagtttctgctacgaaagggacggggggtttacctggacccccagtccggcgaggagctcaacccaatccccccgccgccgcagccctatcagcagccgcgggcccttgcttcccaggatggcacccaaaaagaagctgcagctgccgccgccgccacccacggacgaggaggaatactgggacagtcaggcagaggaggttttggacgaggaggaggagatgatggaagactgggacagcctagacgaagcttccgaggccgaagaggtgtcagacgaaacaccgtcaccctcggtcgcattcccctcgccggcgccccagaaattggcaaccgttcccagcatcgctacaacctccgctcctcaggcgccgccggcactgcctgttcgccgacccaaccgtagatgggacaccactggaaccagggccggtaagtctaagcagccgccgccgttagcccaagagcaacaacagcgccaaggctaccgctcgtggcgcgggcacaagaacgccatagttgcttgcttgcaagactgtgggggcaacatctccttcgcccgccgctttcttctctaccatcacggcgtggccttcccccgtaacatcctgcattactaccgtcatctctacagcccctactgcaccggcggcagcggcagcggcagcaacagcagcggtcacacagaagcaaaggcgaccggatagcaagactctgacaaagcccaagaaatccacagcggcggcagcagcaggaggaggagcgctgcgtctggcgcccaacgaacccgtatcgacccgcgagcttagaaataggatttttcccactctgtatgctatatttcaacaaagcaggggccaagaacaagagctgaaaataaaaaacaggtctctgcgctccctcacccgcagctgcctgtatcacaaaagcgaagatcagcttcggcgcacgctggaagacgcggaggctctcttcagcaaatactgcgcgctgactcttaaggactagtttcgcgccctttctcaaatttaagcgcgaaaactacgtcatctccagcggccacacccggcgccagcacctgtcgtcagcgccattatgagcaaggaaattcccacgccctacatgtggagttaccagccacaaatgggacttgcggctggagctgcccaagactactcaacccgaataaactacatgagcgcgggaccccacatgatatcccgggtcaacggaatccgcgcccaccgaaaccgaattctcctcgaacaggcggctattaccaccacacctcgtaataaccttaatccccgtagttggcccgctgccctggtgtaccaggaaagtcccgctcccaccactgtggtacttcccagagacgcccaggccgaagttcagatgactaactcaggggcgcagcttgcgggcggctttcgtcacagggtgcggtcgcccgggcagggtataactcacctgaaaatcagagggcgaggtattcagctcaacgacgagtcggtgagctcctctcttggtctccgtccggacgggacatttcagatcggcggcgctggccgctcttcatttacgccccgtcaggcgatcctaactctgcagacctcgtcctcggagccgcgctccggaggcattggaactctacaatttattgaggagttcgtgccttcggtttacttcaaccccttttctggacctcccggccactacccggaccagtttattcccaactttgacgcggtgaaagactcggcggacggctacgactgaatgaccagtggagaggcagagcgactgcgcctgacacacctcgaccactgccgccgccacaagtgctttgcccgcggctccggtgagttttgttactttgaattgcccgaagagcatatcgagggcccggcgcacggcgtccggctcaccacccaggtagagcttacacgtagcctgattcgggagtttaccaagcgccccctgctagtggagcgggagcggggtccctgtgttctgaccgtggtttgcaactgtcctaaccctggattacatcaagatctttgttgtcatctctgtgctgagtataataaatacagaaattagaatctactggggctcctgtcgccatcctgtgaacgccaccgtttttacccacccaaagcagaccaaagcaaacctcacctccggtttgcacaagcgggccaataagtaccttacctggtactttaacggctcttcatttgtaatttacaacagtttccagcgagacgaagtaagtttgccacacaaccttctcggcttcaactacaccgtcaagaaaaacaccaccaccaccaccctcctcacctgccgggaacgtacgagtgcgtcaccggttgctgcgcccacacctacagcctgagcgtaaccagacattactcccatttttccaaaacaggaggtgagctcaactcccggaactcaggtcaaaaaagcattttgcggggtgctgggattttttaattaagtatatgagcaattcaagtaactctacaagcttgtctaatttttctggaattggggtcggggttatccttactcttgtaattctgtttattcttatactagcacttctgtgccttagggttgccgcctgctgcacgcacgtttgtacctattgtcagctttttaaacgctgggggcaacatccaagatgaggtacatgattttaggcttgctcgcccttgcggcagtctgcagcgctgccaaaaaggttgagtttaaggaaccagcttgcaatgttacatttaaatcagaagctaatgaatgcactactcttataaaatgcaccacagaacatgaaaagcttattattcgccacaaagacaaaattggcaagtatgctgtatatgctatttggcagccaggtgacactaacgactataatgtcacagtcttccaaggtgaaaatcgtaaaacttttatgtataaatttccattttatgaaatgtgcgatattaccatgtacatgagcaaacagtacaagttgtggcccccacaaaagtgtttagagaacactggcaccttttgttccaccgctctgcttattacagcgcttgctttggtatgtaccttactttatctcaaatacaaaagcagacgcagttttattgatgaaaagaaaatgccttgattttccgcttgcttgtattcccctggacaatttactctatgtgggatatgctccaggcgggcaagattatacccacaaccttcaaatcaaactttcctggacgttagcgcctgatttctgccagcgcctgcactgcaaatttgatcaaacccagcttcagcttgcctgctccagagatgaccggctcaaccatcgcgcccacaacggactatcgcaacaccactgctaccggactaacatctgccctaaatttaccccaagttcatgcctttgtcaatgactgggcgagcttggacatgtggtggttttccatagcgcttatgtttgtttgccttattattatgtggcttatttgttgcctaaagcgcagacgcgccagaccccccatctataggcctatcattgtgctcaacccacacaatgaaaaaattcatagattggacggtctgaaaccatgttctcttcttttacagtatgattaaatgagacatgattcctcgagttcttatattattgacccttgttgcgcttttctgtgcgtgctctacattggccgcggtcgctcacatcgaagtagattgcatcccacctttcacagtttacctgctttacggatttgtcacccttatcctcatctgcagcctcgtcactgtagtcatcgccttcattcagttcattgactgggtttgtgtgcgcattgcgtacctcaggcaccatccgcaatacagagacaggactatagctgatcttctcagaattctttaattatgaaacggagtgtcatttttgttttgctgattttttgcgccctacctgtgctttgctcccaaacctcagcgcctcccaaaagacatatttcctgcagattcactcaaatatggaacattcccagctgctacaacaaacagagcgatttgtcagaagcctggttatacgccatcatctctgtcatggttttttgcagtaccatttttgccctagccatatatccataccttgacattggctggaatgccatagatgccatgaaccaccctactttcccagtgcccgctgtcataccactgcaacaggttattgccccaatcaatcagcctcgccccccttctcccacccccactgagattagctactttaatttgacaggtggagatgactgaatctctagatctagaattggatggaattaacaccgaacagcgcctactagaaaggcgcaaggcggcgtccgagcgagaacgcctaaaacaagaagttgaagacatggttaacctacaccagtgtaaaagaggtatcttttgtgtggtcaagcaggccaaacttacctacgaaaaaaccactaccggcaaccgcctcagctacaagctacccacccagcgccaaaaactggtgcttatggtgggagaaaaacctatcaccgtcacccagcactcggcagaaacagagggctgcctgcacttcccctatcagggtccagaggacctctgcactcttattaaaaccatgtgtggtattagagatcttattccattcaactaacataaacacacaataaattacttacttaaaatcagtcagcaaatctttgtccagcttattcagcatcacctcctttccttcctcccaactctggtatctcagccgccttttagctgcaaactttctccaaagtttaaatgggatgtcaaattcctcatgttcttgtccctccgcacccactatcttcatattgttgcagatgaaacgcgccagaccgtctgaagacaccttcaaccccgtgtatccatatgacacagaaaccgggcctccaactgtgccctttcttacccctccatttgtttcacccaatggtttccaagaaagtccccctggagttctctctctacgcgtctccgaacctttggacacctcccacggcatgcttgcgcttaaaatgggcagcggtcttaccctagacaaggccggaaacctcacctcccaaaatgtaaccactgttactcagccacttaaaaaaacaaagtcaaacataagtttggacacctccgcaccacttacaattacctcaggcgccctaacagtggcaaccaccgctcctctgatagttactagcggcgctcttagcgtacagtcacaagccccactgaccgtgcaagactccaaactaagcattgctactaaagggcccattacagtgtcagatggaaagctagccctgcaaacatcagcccccctctctggcagtgacagcgacacccttactgtaactgcatcacccccgctaactactgccacgggtagcttgggcattaacatggaagatcctatttatgtaaataatggaaaaataggaattaaaataagcggtcctttgcaagtagcacaaaactccgatacactaacagtagttactggaccaggtgtcaccgttgaacaaaactcccttagaaccaaagttgcaggagctattggttatgattcatcaaacaacatggaaattaaaacgggcggtggcatgcgtataaataacaacttgttaattctagatgtggattacccatttgatgctcaaacaaaactacgtcttaaactggggcagggacccctgtatattaatgcatctcataacttggacataaactataacagaggcctatacctttttaatgcatcaaacaatactaaaaaactggaagttagcataaaaaaatccagtggactaaactttgataatactgccatagctataaatgcaggaaagggtctggagtttgatacaaacacatctgagtctccagatatcaacccaataaaaactaaaattggctctggcattgattacaatgaaaacggtgccatgattactaaacttggagcgggtttaagctttgacaactcaggggccattacaataggaaacaaaaatgatgacaaacttaccctgtggacaaccccagacccatctcctaactgcagaattcattcagataatgactgcaaatttactttggttcttacaaaatgtgggagtcaagtactagctactgtagctgctttggctgtatctggagatctttcatccatgacaggcaccgttgcaagtgttagtatattccttagatttgaccaaaacggtgttctaatggagaactcctcacttaaaaaacattactggaactttagaaatgggaactcaactaatgcaaatccatacacaaatgcagttggatttatgcctaaccttctagcctatccaaaaacccaaagtcaaactgctaaaaataacattgtcagtcaagtttacttgcatggtgataaaactaaacctatgatacttaccattacacttaatggcactagtgaatccacagaaactagcgaggtaagcacttactctatgtcttttacatggtcctgggaaagtggaaaatacaccactgaaacttttgctaccaactcttacaccttctcctacattgcccaggaataaagaatcgtgaacctgttgcatgttatgtttcaacgtgtttatttttcaattgcagaaaatttcaagtcatttttcattcagtagtatagccccaccaccacatagcttatattgatcaccgtaccttaatcaaactcacagaaccctagtattcaacctgccacctccctcccaacacacagagtacacagtcctttctccccggctggccttaaaaagcatcatatcatgggtaacagacatattcttaggtgttatattccacacggtttcctgtcgagccaaacgctcatcagtgatattaataaactccccgggcagctcgcttaagttcatgtcgctgtccagctgctgagccacaggctgctgtccaacttgcggttgctcaacgggcggcgaaggggaagtccacgcctacatgggggtagagtcataatcgtgcatcaggatagggcggtggtgctgcagcagcgcgcgaataaactgctgccgccgccgctccgtcctgcaggaatacaacatggcagtggtctcctcagcgatgattcgcaccgcccgcagcatgagacgccttgtcctccgggcacagcagcgcaccctgatctcacttaaatcagcacagtaactgcagcacagcaccacaatattgttcaaaatcccacagtgcaaggcgctgtatccaaagctcatggcggggaccacagaacccacgtggccatcataccacaagcgcaggtagattaagtggcgacccctcataaacacgctggacataaacattacctcttttggcatgttgtaattcaccacctcccggtaccatataaacctctgattaaacatggcgccatccaccaccatcctaaaccagctggccaaaacctgcccgccggctatgcactgcagggaaccgggactggaacaatgacagtggagagcccaggactcgtaaccatggatcatcatgctcgtcatgatatcaatgttggcacaacacaggcacacgtgcatacacttcctcaggattacaagctcctcccgcgtcagaaccatatcccagggaacaacccattcctgaatcagcgtaaatcccacactgcagggaagacctcgcacgtaactcacgttgtgcattgtcaaagtgttacattcgggcagcagcggatgatcctccagtatggtagcgcgggtctctgtctcaaaaggaggtaggcgatccctactgtacggagtgcgccgagacaaccgagatcgtgttggtcgtagtgtcatgccaaatggaacgccggacgtagtcatatttcctgaagcaaaaccaggtgcgggcgtgacaaacagatctgcgtctccggtctcgtcgcttagctcgctctgtgtagtagttgtagtatatccactctctcaaagcatccaggcgccccctggcttcgggttctatgtaaactccttcatgcgccgctgccctgataacatccaccaccgcagaataagccacacccagccaacctacacattcgttctgcgagtcacacacgggaggagcgggaagagctggaagaaccatgttttttttttttttattccaaaagattatccaaaacctcaaaatgaagatctattaagtgaacgcgctcccctccggtggcgtggtcaaactctacagccaaagaacagataatggcatttgtaagatgttgcacaatggcttccaaaaggcaaactgccctcacgtccaagtggacgtaaaggctaaacccttcagggtgaatctcctctataaacattccagcaccttcaaccatgcccaaataattttcatctcgccaccttatcaatatgtctctaagcaaatcccgaatattaagtccggccattgtaaaaatctgctccagagcgccctccaccttcagcctcaagcagcgaatcatgattgcaaaaattcaggttcctcacagacctgtataagattcaaaagcggaacattaacaaaaataccgcgatcccgtaggtcccttcgcagggccagctgaacataatcgtgcaggtctgcacggaccagcgcggccacttccccgccaggaaccatgacaaaagaacccacactgattatgacacgcatactcggagctatgctaaccagcgtagcccctatgtaagcttgttgcatgggcggcgatataaaatgcaaggtgctgctcaaaaaatcaggcaaagcctcgcgcaaaaaagcaagcacatcgtagtcatgctcatgcagataaaggcaggtaagttccggaaccaccacagaaaaagacaccatttttctctcaaacatgtctgcgggttcctgcattaaacacaaaataaaataacaaaaaaaaacatttaaacattagaagcctgtcttacaacaggaaaaacaacccttataagcataagacggactacggccatgccggcgtgaccgtaaaaaaactggtcaccgtgattaaaaagcaccaccgacagttcctcggtcatgtccggagtcataatgtaagactcggtaaacacatcaggttggttaacatcggtcagtgctaaaaagcgaccgaaatagcccgggggaatacatacccgcaggcgtagagacaacattacagcccccataggaggtataacaaaattaataggagagaaaaacacataaacacctgaaaaaccctcctgcctaggcaaaatagcaccctcccgctccagaacaacatacagcgcttccacagcggcagccataacagtcagccttaccagtaaaaaaacctattaaaaaacaccactcgacacggcaccagctcaatcagtcacagtgtaaaaagggccaagtacagagcgagtatatataggactaaaaaatgacgtaacggttaaagtccacaaaaaacacccagaaaaccgcacgcgaacctacgcccagaaacgaaagccaaaaaacccacaacttcctcaaatcttcacttccgttttcccacgatacgtcacttcccattttaaaaaaactacaattcccaatacatgcaagttactccgccctaaaacctacgtcacccgccccgttcccacgccccgcgccacgtcacaaactccaccccctcattatcatattggcttcaatccaaaataaggtatattatgatgatg

SEQ ID NO: 732 - DNA, 35938 bp, Adeno Virus
catcatcaataatataccttattttggattgaagccaatatgataatgagggggtggagtttgtgacgtggcgcggggcgtgggaacggggcgggtgacgtagtagtgtggcggaagtgtgatgttgcaagtgtggcggaacacatgtaagcgacggatgtggcaaaagtgacgtttttggtgtgcgccggtgtacacaggaagtgacaattttcgcgcggttttaggcggatgttgtagtaaatttgggcgtaaccgagtaagatttggccattttcgcgggaaaactgaataagaggaagtgaaatctgaataattttgtgttactcatagcgcgtaatatttgtctagggccgcggggactttgaccgtttacgtggagactcgcccaggtgtttttctcaggtgttttccgcgttccgggtcaaagttggcgttttattattatagtcagctgacgtgtagtgtatttatacccggtgagttcctcaagaggccactcttgagtgccagcgagtagagttttctcctccgagccgctccgacaccgggactgaaaatgagacatattatctgccacggaggtgttattaccgaagaaatggccgccagtcttttggaccagctgatcgaagaggtactggctgataatcttccacctcctagccattttgaaccacctacccttcacgaactgtatgatttagacgtgacggcccccgaagatcccaacgaggaggcggtttcgcagatttttcccgactctgtaatgttggcggtgcaggaagggattgacttactcacttttccgccggcgcccggttctccggagccgcctcacctttcccggcagcccgagcagccggagcagagagccttgggtccggtttctatgccaaaccttgtaccggaggtgatcgatcttacctgccacgaggctggctttccacccagtgacgacgaggatgaagagggtgaggagtttgtgttagattatgtggagcaccccgggcacggttgcaggtcttgtcattatcaccggaggaatacgggggacccagatattatgtgttcgctttgctatatgaggacctgtggcatgtttgtctacagtaagtgaaaattatgggcagtgggtgatagagtggtgggtttggtgtggtaattttttttttaatttttacagttttgtggtttaaagaattttgtattgtgatttttttaaaaggtcctgtgtctgaacctgagcctgagcccgagccagaaccggagcctgcaagacctacccgccgtcctaaaatggcgcctgctatcctgagacgcccgacatcacctgtgtctagagaatgcaatagtagtacggatagctgtgactccggtccttctaacacacctcctgagatacacccggtggtcccgctgtgccccattaaaccagttgccgtgagagttggtgggcgtcgccaggctgtggaatgtatcgaggacttgcttaacgagcctgggcaacctttggacttgagctgtaaacgccccaggccataaggtgtaaacctgtgattgcgtgtgtggttaacgcctttgtttgctgaatgagttgatgtaagtttaataaagggtgagataatgtttaacttgcatggcgtgttaaatggggcggggcttaaagggtatataatgcgccgtgggctaatcttggttacatctgacctcatggaggcttgggagtgtttggaagatttttctgctgtgcgtaacttgctggaacagagctctaacagtacctcttggttttggaggtttctgtggggctcatcccaggcaaagttagtctgcagaattaaggaggattacaagtgggaatttgaagagcttttgaaatcctgtggtgagctgtttgattctttgaatctgggtcaccaggcgcttttccaagagaaggtcatcaagactttggatttttccacaccggggcgcgctgcggctgctgttgcttttttgagttttataaaggataaatggagcgaagaaacccatctgagcggggggtacctgctggattttctggccatgcatctgtggagagcggttgtgagacacaagaatcgcctgctactgttgtcttccgtccgcccggcgataataccgacggaggagcagcagcagcagcaggaggaagccaggcggcggcggcaggagcagagcccatggaacccgagagccggcctggaccctcgggaatgaatgttgtacaggtggctgaactgtatccagaactgagacgcattttgacaattacagaggatgggcaggggctaaagggggtaaagagggagcggggggcttgtgaggctacagaggaggctaggaatctagcttttagcttaatgaccagacaccgtcctgagtgtattacttttcaacagatcaaggataattgcgctaatgagcttgatctgctggcgcagaagtattccatagagcagctgaccacttactggctgcagccaggggatgattttgaggaggctattagggtatatgcaaaggtggcacttaggccagattgcaagtacaagatcagcaaacttgtaaatatcaggaattgttgctacatttctgggaacggggccgaggtggagatagatacggaggatagggtggcctttagatgtagcatgataaatatgtggccgggggtgcttggcatggacggggtggttattatgaatgtaaggtttactggccccaattttagcggtacggttttcctggccaataccaaccttatcctacacggtgtaagcttctatgggtttaacaatacctgtgtggaagcctggaccgatgtaagggttcggggctgtgccttttactgctgctggaagggggtggtgtgtcgccccaaaagcagggcttcaattaagaaatgcctctttgaaaggtgtaccttgggtatcctgtctgagggtaactccagggtgcgccacaatgtggcctccgactgtggttgcttcatgctagtgaaaagcgtggctgtgattaagcataacatggtatgtggcaactgcgaggacagggcctctcagatgctgacctgctcggacggcaactgtcacctgctgaagaccattcacgtagccagccactctcgcaaggcctggccagtgtttgagcataacatactgacccgctgttccttgcatttgggtaacaggaggggggtgttcctaccttaccaatgcaatttgagtcacactaagatattgcttgagcccgagagcatgtccaaggtgaacctgaacggggtgtttgacatgaccatgaagatctggaaggtgctgaggtacgatgagacccgcaccaggtgcagaccctgcgagtgtggcggtaaacatattaggaaccagcctgtgatgctggatgtgaccgaggagctgaggcccgatcacttggtgctggcctgcacccgcgctgagtttggctctagcgatgaagatacagattgaggtactgaaatgtgtgggcgtggcttaagggtgggaaagaatatataaggtgggggtcttatgtagttttgtatctgttttgcagcagccgccgccgccatgagcaccaactcgtttgatggaagcattgtgagctcatatttgacaacgcgcatgcccccatgggccggggtgcgtcagaatgtgatgggctccagcattgatggtcgccccgtcctgcccgcaaactctactaccttgacctacgagaccgtgtctggaacgccgttggagactgcagcctccgccgccgcttcagccgctgcagccaccgcccgcgggattgtgactgactttgctttcctgagcccgcttgcaagcagtgcagcttcccgttcatccgcccgcgatgacaagttgacggctcttttggcacaattggattctttgacccgggaacttaatgtcgtttctcagcagctgttggatctgcgccagcaggtttctgccctgaaggcttcctcccctcccaatgcggtttaaaacataaataaaaaaccagactctgtttggatttggatcaagcaagtgtcttgctgtctttatttaggggttttgcgcgcgcggtaggcccgggaccagcggtctcggtcgttgagggtcctgtgtattttttccaggacgtggtaaaggtgactctggatgttcagatacatgggcataagcccgtctctggggtggaggtagcaccactgcagagcttcatgctgcggggtggtgttgtagatgatccagtcgtagcaggagcgctgggcgtggtgcctaaaaatgtctttcagtagcaagctgattgccaggggcaggcccttggtgtaagtgtttacaaagcggttaagctgggatgggtgcatacgtggggatatgagatgcatcttggactgtatttttaggttggctatgttcccagccatatccctccggggattcatgttgtgcagaaccaccagcacagtgtatccggtgcacttgggaaatttgtcatgtagcttagaaggaaatgcgtggaagaacttggagacgcccttgtgacctccaagattttccatgcattcgtccataatgatggcaatgggcccacgggcggcggcctgggcgaagatatttctgggatcactaacgtcatagttgtgttccaggatgagatcgtcataggccatttttacaaagcgcgggcggagggtgccagactgcggtataatggttccatccggcccaggggcgtagttaccctcacagatttgcatttcccacgctttgagttcagatggggggatcatgtctacctgcggggcgatgaagaaaacggtttccggggtaggggagatcagctgggaagaaagcaggttcctgagcagctgcgacttaccgcagccggtgggcccgtaaatcacacctattaccgggtgcaactggtagttaagagagctgcagctgccgtcatccctgagcaggggggccacttcgttaagcatgtccctgactcgcatgttttccctgaccaaatccgccagaaggcgctcgccgcccagcgatagcagttcttgcaaggaagcaaagtttttcaacggtttgagaccgtccgccgtaggcatgcttttgagcgtttgaccaagcagttccaggcggtcccacagctcggtcacctgctctacggcatctcgatccagcatatctcctcgtttcgcgggttggggcggctttcgctgtacggcagtagtcggtgctcgtccagacgggccagggtcatgtctttccacgggcgcagggtcctcgtcagcgtagtctgggtcacggtgaaggggtgcgctccgggctgcgcgctggccagggtgcgcttgaggctggtcctgctggtgctgaagcgctgccggtcttcgccctgcgcgtcggccaggtagcatttgaccatggtgtcatagtccagcccctccgcggcgtggcccttggcgcgcagcttgcccttggaggaggcgccgcacgaggggcagtgcagacttttgagggcgtagagcttgggcgcgagaaataccgattccggggagtaggcatccgcgccgcaggccccgcagacggtctcgcattccacgagccaggtgagctctggccgttcggggtcaaaaaccaggtttcccccatgctttttgatgcgtttcttacctctggtttccatgagccggtgtccacgctcggtgacgaaaaggctgtccgtgtccccgtatacagacttgagaggcctgtcctcgagcggtgttccgcggtcctcctcgtatagaaactcggaccactctgagacaaaggctcgcgtccaggccagcacgaaggaggctaagtgggaggggtagcggtcgttgtccactagggggtccactcgctccagggtgtgaagacacatgtcgccctcttcggcatcaaggaaggtgattggtttgtaggtgtaggccacgtgaccgggtgttcctgaaggggggctataaaagggggtgggggcgcgttcgtcctcactctcttccgcatcgctgtctgcgagggccagctgttggggtgagtactccctctgaaaagcgggcatgacttctgcgctaagattgtcagtttccaaaaacgaggaggatttgatattcacctggcccgcggtgatgcctttgagggtggccgcatccatctggtcagaaaagacaatctttttgttgtcaagcttggtggcaaacgacccgtagagggcgttggacagcaacttggcgatggagcgcagggtttggtttttgtcgcgatcggcgcgctccttggccgcgatgtttagctgcacgtattcgcgcgcaacgcaccgccattcgggaaagacggtggtgcgctcgtcgggcaccaggtgcacgcgccaaccgcggttgtgcagggtgacaaggtcaacgctggtggctacctctccgcgtaggcgctcgttggtccagcagaggcggccgcccttgcgcgagcagaatggcggtagggggtctagctgcgtctcgtccggggggtctgcgtccacggtaaagaccccgggcagcaggcgcgcgtcgaagtagtctatcttgcatccttgcaagtctagcgcctgctgccatgcgcgggcggcaagcgcgcgctcgtatgggttgagtgggggaccccatggcatggggtgggtgagcgcggaggcgtacatgccgcaaatgtcgtaaacgtagaggggctctctgagtattccaagatatgtagggtagcatcttccaccgcggatgctggcgcgcacgtaatcgtatagttcgtgcgagggagcgaggaggtcgggaccgaggttgctacgggcgggctgctctgctcggaagactatctgcctgaagatggcatgtgagttggatgatatggttggacgctggaagacgttgaagctggcgtctgtgagacctaccgcgtcacgcacgaaggaggcgtaggagtcgcgcagcttgttgaccagctcggcggtgacctgcacgtctagggcgcagtagtccagggtttccttgatgatgtcatacttatcctgtcccttttttttccacagctcgcggttgaggacaaactcttcgcggtctttccagtactcttggatcggaaacccgtcggcctccgaacggtaagagcctagcatgtagaactggttgacggcctggtaggcgcagcatcccttttctacgggtagcgcgtatgcctgcgcggccttccggagcgaggtgtgggtgagcgcaaaggtgtccctgaccatgactttgaggtactggtatttgaagtcagtgtcgtcgcatccgccctgctcccagagcaaaaagtccgtgcgctttttggaacgcggatttggcagggcgaaggtgacatcgttgaagagtatctttcccgcgcgaggcataaagttgcgtgtgatgcggaagggtcccggcacctcggaacggttgttaattacctgggcggcgagcacgatctcgtcaaagccgttgatgttgtggcccacaatgtaaagttccaagaagcgcgggatgcccttgatggaaggcaattttttaagttcctcgtaggtgagctcttcaggggagctgagcccgtgctctgaaagggcccagtctgcaagatgagggttggaagcgacgaatgagctccacaggtcacgggccattagcatttgcaggtggtcgcgaaaggtcctaaactggcgacctatggccattttttctggggtgatgcagtagaaggtaagcgggtcttgttcccagcggtcccatccaaggttcgcggctaggtctcgcgcggcagtcactagaggctcatctccgccgaacttcatgaccagcatgaagggcacgagctgcttcccaaaggcccccatccaagtataggtctctacatcgtaggtgacaaagagacgctcggtgcgaggatgcgagccgatcgggaagaactggatctcccgccaccaattggaggagtggctattgatgtggtgaaagtagaagtccctgcgacgggccgaacactcgtgctggcttttgtaaaaacgtgcgcagtactggcagcggtgcacgggctgtacatcctgcacgaggttgacctgacgaccgcgcacaaggaagcagagtgggaatttgagcccctcgcctggcgggtttggctggtggtcttctacttcggctgcttgtccttgaccgtctggctgctcgaggggagttacggtggatcggaccaccacgccgcgcgagcccaaagtccagatgtccgcgcgcggcggtcggagcttgatgacaacatcgcgcagatgggagctgtccatggtctggagctcccgcggcgtcaggtcaggcgggagctcctgcaggtttacctcgcatagacgggtcagggcgcgggctagatccaggtgatacctaatttccaggggctggttggtggcggcgtcgatggcttgcaagaggccgcatccccgcggcgcgactacggtaccgcgcggcgggcggtgggccgcgggggtgtccttggatgatgcatctaaaagcggtgacgcgggcgagcccccggaggtagggggggctccggacccgccgggagagggggcaggggcacgtcggcgccgcgcgcgggcaggagctggtgctgcgcgcgtaggttgctggcgaacgcgacgacgcggcggttgatctcctgaatctggcgcctctgcgtgaagacgacgggcccggtgagcttgagcctgaaagagagttcgacagaatcaatttcggtgtcgttgacggcggcctggcgcaaaatctcctgcacgtctcctgagttgtcttgataggcgatctcggccatgaactgctcgatctcttcctcctggagatctccgcgtccggctcgctccacggtggcggcgaggtcgttggaaatgcgggccatgagctgcgagaaggcgttgaggcctccctcgttccagacgcggctgtagaccacgcccccttcggcatcgcgggcgcgcatgaccacctgcgcgagattgagctccacgtgccgggcgaagacggcgtagtttcgcaggcgctgaaagaggtagttgagggtggtggcggtgtgttctgccacgaagaagtacataacccagcgtcgcaacgtggattcgttgatatcccccaaggcctcaaggcgctccatggcctcgtagaagtccacggcgaagttgaaaaactgggagttgcgcgccgacacggttaactcctcctccagaagacggatgagctcggcgacagtgtcgcgcacctcgcgctcaaaggctacaggggcctcttcttcttcttcaatctcctcttccataagggcctccccttcttcttcttctggcggcggtgggggaggggggacacggcggcgacgacggcgcaccgggaggcggtcgacaaagcgctcgatcatctccccgcggcgacggcgcatggtctcggtgacggcgcggccgttctcgcgggggcgcagttggaagacgccgcccgtcatgtcccggttatgggttggcggggggctgccatgcggcagggatacggcgctaacgatgcatctcaacaattgttgtgtaggtactccgccgccgagggacctgagcgagtccgcatcgaccggatcggaaaacctctcgagaaaggcgtctaaccagtcacagtcgcaaggtaggctgagcaccgtggcgggcggcagcgggcggcggtcggggttgtttctggcggaggtgctgctgatgatgtaattaaagtaggcggtcttgagacggcggatggtcgacagaagcaccatgtccttgggtccggcctgctgaatgcgcaggcggtcggccatgccccaggcttcgttttgacatcggcgcaggtctttgtagtagtcttgcatgagcctttctaccggcacttcttcttctccttcctcttgtcctgcatctcttgcatctatcgctgcggcggcggcggagtttggccgtaggtggcgccctcttcctcccatgcgtgtgaccccgaagcccctcatcggctgaagcagggctaggtcggcgacaacgcgctcggctaatatggcctgctgcacctgcgtgagggtagactggaagtcatccatgtccacaaagcggtggtatgcgcccgtgttgatggtgtaagtgcagttggccataacggaccagttaacggtctggtgacccggctgcgagagctcggtgtacctgagacgcgagtaagccctcgagtcaaatacgtagtcgttgcaagtccgcaccaggtactggtatcccaccaaaaagtgcggcggcggctggcggtagaggggccagcgtagggtggccggggctccgggggcgagatcttccaacataaggcgatgatatccgtagatgtacctggacatccaggtgatgccggcggcggtggtggaggcgcgcggaaagtcgcggacgcggttccagatgttgcgcagcggcaaaaagtgctccatggtcgggacgctctggccggtcaggcgcgcgcaatcgttgacgctctagaccgtgcaaaaggagagcctgtaagcgggcactcttccgtggtctggtggataaattcgcaagggtatcatggcggacgaccggggttcgagccccgtatccggccgtccgccgtgatccatgcggttaccgcccgcgtgtcgaacccaggtgtgcgacgtcagacaacgggggagtgctccttttggcttccttccaggcgcggcggctgctgcgctagcttttttggccactggccgcgcgcagcgtaagcggttaggctggaaagcgaaagcattaagtggctcgctccctgtagccggagggttattttccaagggttgagtcgcgggacccccggttcgagtctcggaccggccggactgcggcgaacgggggtttgcctccccgtcatgcaagaccccgcttgcaaattcctccggaaacagggacgagccccttttttgcttttcccagatgcatccggtgctgcggcagatgcgcccccctcctcagcagcggcaagagcaagagcagcggcagacatgcagggcaccctcccctcctcctaccgcgtcaggaggggcgacatccgcggttgacgcggcagcagatggtgattacgaacccccgcggcgccgggcccggcactacctggacttggaggagggcgagggcctggcgcggctaggagcgccctctcctgagcggtacccaagggtgcagctgaagcgtgatacgcgtgaggcgtacgtgccgcggcagaacctgtttcgcgaccgcgagggagaggagcccgaggagatgcgggatcgaaagttccacgcagggcgcgagctgcggcatggcctgaatcgcgagcggttgctgcgcgaggaggactttgagcccgacgcgcgaaccgggattagtcccgcgcgcgcacacgtggcggccgccgacctggtaaccgcatacgagcagacggtgaaccaggagattaactttcaaaaaagctttaacaaccacgtgcgtacgcttgtggcgcgcgaggaggtggctataggactgatgcatctgtgggactttgtaagcgcgctggagcaaaacccaaatagcaagccgctcatggcgcagctgttccttatagtgcagcacagcagggacaacgaggcattcagggatgcgctgctaaacatagtagagcccgagggccgctggctgctcgatttgataaacatcctgcagagcatagtggtgcaggagcgcagcttgagcctggctgacaaggtggccgccatcaactattccatgcttagcctgggcaagttttacgcccgcaagatataccataccccttacgttcccatagacaaggaggtaaagatcgaggggttctacatgcgcatggcgctgaaggtgcttaccttgagcgacgacctgggcgtttatcgcaacgagcgcatccacaaggccgtgagcgtgagccggcggcgcgagctcagcgaccgcgagctgatgcacagcctgcaaagggccctggctggcacgggcagcggcgatagagaggccgagtcctactttgacgcgggcgctgacctgcgctgggccccaagccgacgcgccctggaggcagctggggccggacctgggctggcggtggcacccgcgcgcgctggcaacgtcggcggcgtggaggaatatgacgaggacgatgagtacgagccagaggacggcgagtactaagcggtgatgtttctgatcagatgatgcaagacgcaacggacccggcggtgcgggcggcgctgcagagccagccgtccggccttaactccacggacgactggcgccaggtcatggaccgcatcatgtcgctgactgcgcgcaatcctgacgcgttccggcagcagccgcaggccaaccggctctccgcaattctggaagcggtggtcccggcgcgcgcaaaccccacgcacgagaaggtgctggcgatcgtaaacgcgctggccgaaaacagggccatccggcccgacgaggccggcctggtctacgacgcgctgcttcagcgcgtggctcgttacaacagcggcaacgtgcagaccaacctggaccggctggtgggggatgtgcgcgaggccgtggcgcagcgtgagcgcgcgcagcagcagggcaacctgggctccatggttgcactaaacgccttcctgagtacacagcccgccaacgtgccgcggggacaggaggactacaccaactttgtgagcgcactgcggctaatggtgactgagacaccgcaaagtgaggtgtaccagtctgggccagactattttttccagaccagtagacaaggcctgcagaccgtaaacctgagccaggctttcaaaaacttgcaggggctgtggggggtgcgggctcccacaggcgaccgcgcgaccgtgtctagcttgctgacgcccaactcgcgcctgttgctgctgctaatagcgcccttcacggacagtggcagcgtgtcccgggacacatacctaggtcacttgctgacactgtaccgcgaggccataggtcaggcgcatgtggacgagcatactttccaggagattacaagtgtcagccgcgcgctggggcaggaggacacgggcagcctggaggcaaccctaaactacctgctgaccaaccggcggcagaagatcccctcgttgcacagtttaaacagcgaggaggagcgcattttgcgctacgtgcagcagagcgtgagccttaacctgatgcgcgacggggtaacgcccagcgtggcgctggacatgaccgcgcgcaacatggaaccgggcatgtatgcctcaaaccggccgtttatcaaccgcctaatggactacttgcatcgcgcggccgccgtgaaccccgagtatttcaccaatgccatcttgaacccgcactggctaccgccccctggtttctacaccgggggattcgaggtgcccgagggtaacgatggattcctctgggacgacatagacgacagcgtgttttccccgcaaccgcagaccctgctagagttgcaacagcgcgagcaggcagaggcggcgctgcgaaaggaaagcttccgcaggccaagcagcttgtccgatctaggcgctgcggccccgcggtcagatgctagtagcccatttccaagcttgatagggtctcttaccagcactcgcaccacccgcccgcgcctgctgggcgaggaggagtacctaaacaactcgctgctgcagccgcagcgcgaaaaaaacctgcctccggcatttcccaacaacgggatagagagcctagtggacaagatgagtagatggaagacgtacgcgcaggagcacagggacgtgccaggcccgcgcccgcccacccgtcgtcaaaggcacgaccgtcagcggggtctggtgtgggaggacgatgactcggcagacgacagcagcgtcctggatttgggagggagtggcaacccgtttgcgcaccttcgccccaggctggggagaatgttttaaaaaaaaaaaagcatgatgcaaaataaaaaactcaccaaggccatggcaccgagcgttggttttcttgtattccccttagtatgcggcgcgcggcgatgtatgaggaaggtcctcctccctcctacgagagtgtggtgagcgcggcgccagtggcggcggcgctgggttctcccttcgatgctcccctggacccgccgtttgtgcctccgcggtacctgcggcctaccggggggagaaacagcatccgttactctgagttggcacccctattcgacaccacccgtgtgtacctggtggacaacaagtcaacggatgtggcatccctgaactaccagaacgaccacagcaactttctgaccacggtcattcaaaacaatgactacagcccgggggaggcaagcacacagaccatcaatcttgacgaccggtcgcactggggcggcgacctgaaaaccatcctgcataccaacatgccaaatgtgaacgagttcatgtttaccaataagtttaaggcgcgggtgatggtgtcgcgcttgcctactaaggacaatcaggtggagctgaaatacgagtgggtggagttcacgctgcccgagggcaactactccgagaccatgaccatagaccttatgaacaacgcgatcgtggagcactacttgaaagtgggcagacagaacggggttctggaaagcgacatcggggtaaagtttgacacccgcaacttcagactggggtttgaccccgtcactggtcttgtcatgcctggggtatatacaaacgaagccttccatccagacatcattttgctgccaggatgcggggtggacttcacccacagccgcctgagcaacttgttgggcatccgcaagcggcaacccttccaggagggctttaggatcacctacgatgatctggagggtggtaacattcccgcactgttggatgtggacgcctaccaggcgagcttgaaagatgacaccgaacagggcgggggtggcgcaggcggcagcaacagcagtggcagcggcgcggaagagaactccaacgcggcagccgcggcaatgcagccggtggaggacatgaacgatcatgccattcgcggcgacacctttgccacacgggctgaggagaagcgcgctgaggccgaagcagcggccgaagctgccgcccccgctgcgcaacccgaggtcgagaagcctcagaagaaaccggtgatcaaacccctgacagaggacagcaagaaacgcagttacaacctaataagcaatgacagcaccttcacccagtaccgcagctggtaccttgcatacaactacggcgaccctcagaccggaatccgctcatggaccctgctttgcactcctgacgtaacctgcggctcggagcaggtctactggtcgttgccagacatgatgcaagaccccgtgaccttccgctccacgcgccagatcagcaactttccggtggtgggcgccgagctgttgcccgtgcactccaagagcttctacaacgaccaggccgtctactcccaactcatccgccagtttacctctctgacccacgtgttcaatcgctttcccgagaaccagattttggcgcgcccgccagcccccaccatcaccaccgtcagtgaaaacgttcctgctctcacagatcacgggacgctaccgctgcgcaacagcatcggaggagtccagcgagtgaccattactgacgccagacgccgcacctgcccctacgtttacaaggccctgggcatagtctcgccgcgcgtcctatcgagccgcactttttgagcaagcatgtccatccttatatcgcccagcaataacacaggctggggcctgcgcttcccaagcaagatgtttggcggggccaagaagcgctccgaccaacacccagtgcgcgtgcgcgggcactaccgcgcgccctggggcgcgcacaaacgcggccgcactgggcgcaccaccgtcgatgacgccatcgacgcggtggtggaggaggcgcgcaactacacgcccacgccgccaccagtgtccacagtggacgcggccattcagaccgtggtgcgcggagcccggcgctatgctaaaatgaagagacggcggaggcgcgtagcacgtcgccaccgccgccgacccggcactgccgcccaacgcgcggcggcggccctgcttaaccgcgcacgtcgcaccggccgacgggcggccatgcgggccgctcgaaggctggccgcgggtattgtcactgtgccccccaggtccaggcgacgagcggccgccgcagcagccgcggccattagtgctatgactcagggtcgcaggggcaacgtgtattgggtgcgcgactcggttagcggcctgcgcgtgcccgtgcgcacccgccccccgcgcaactagattgcaagaaaaaactacttagactcgtactgttgtatgtatccagcggcggcggcgcgcaacgaagctatgtccaagcgcaaaatcaaagaagagatgctccaggtcatcgcgccggagatctatggccccccgaagaaggaagagcaggattacaagccccgaaagctaaagcgggtcaaaaagaaaaagaaagatgatgatgatgaacttgacgacgaggtggaactgctgcacgctaccgcgcccaggcgacgggtacagtggaaaggtcgacgcgtaaaacgtgttttgcgacccggcaccaccgtagtctttacgcccggtgagcgctccacccgcacctacaagcgcgtgtatgatgaggtgtacggcgacgaggacctgcttgagcaggccaacgagcgcctcggggagtttgcctacggaaagcggcataaggacatgctggcgttgccgctggacgagggcaacccaacacctagcctaaagcccgtaacactgcagcaggtgctgcccgcgcttgcaccgtccgaagaaaagcgcggcctaaagcgcgagtctggtgacttggcacccaccgtgcagctgatggtacccaagcgccagcgactggaagatgtcttggaaaaaatgaccgtggaacctgggctggagcccgaggtccgcgtgcggccaatcaagcaggtggcgccgggactgggcgtgcagaccgtggacgttcagatacccactaccagtagcaccagtattgccaccgccacagagggcatggagacacaaacgtccccggttgcctcagcggtggcggatgccgcggtgcaggcggtcgctgcggccgcgtccaagacctctacggaggtgcaaacggacccgtggatgtttcgcgtttcagccccccggcgcccgcgcggttcgaggaagtacggcgccgccagcgcgctactgcccgaatatgccctacatccttccattgcgcctacccccggctatcgtggctacacctaccgccccagaagacgagcaactacccgacgccgaaccaccactggaacccgccgccgccgtcgccgtcgccagcccgtgctggccccgatttccgtgcgcagggtggctcgcgaaggaggcaggaccctggtgctgccaacagcgcgctaccaccccagcatcgtttaaaagccggtctttgtggttcttgcagatatggccctcacctgccgcctccgtttcccggtgccgggattccgaggaagaatgcaccgtaggaggggcatggccggccacggcctgacgggcggcatgcgtcgtgcgcaccaccggcggcggcgcgcgtcgcaccgtcgcatgcgcggcggtatcctgcccctccttattccactgatcgccgcggcgattggcgccgtgcccggaattgcatccgtggccttgcaggcgcagagacactgattaaaaacaagttgcatgtggaaaaatcaaaataaaaagtctggactctcacgctcgcttggtcctgtaactattttgtagaatggaagacatcaactttgcgtctctggccccgcgacacggctcgcgcccgttcatgggaaactggcaagatatcggcaccagcaatatgagcggtggcgccttcagctggggctcgctgtggagcggcattaaaaatttcggttccaccgttaagaactatggcagcaaggcctggaacagcagcacaggccagatgctgagggataagttgaaagagcaaaatttccaacaaaaggtggtagatggcctggcctctggcattagcggggtggtggacctggccaaccaggcagtgcaaaataagattaacagtaagcttgatccccgccctcccgtagaggagcctccaccggccgtggagacagtgtctccagaggggcgtggcgaaaagcgtccgcgccccgacagggaagaaactctggtgacgcaaatagacgagcctccctcgtacgaggaggcactaaagcaaggcctgcccaccacccgtcccatcgcgcccatggctaccggagtgctgggccagcacacacccgtaacgctggacctgcctccccccgccgacacccagcagaaacctgtgctgccaggcccgaccgccgttgttgtaacccgtcctagccgcgcgtccctgcgccgcgccgccagcggtccgcgatcgttgcggcccgtagccagtggcaactggcaaagcacactgaacagcatcgtgggtctgggggtgcaatccctgaagcgccgacgatgcttctgaatagctaacgtgtcgtatgtgtgtcatgtatgcgtccatgtcgccgccagaggagctgctgagccgccgcgcgcccgctttccaagatggctaccccttcgatgatgccgcagtggtcttacatgcacatctcgggccaggacgcctcggagtacctgagccccgggctggtgcagtttgcccgcgccaccgagacgtacttcagcctgaataacaagtttagaaaccccacggtggcgcctacgcacgacgtgaccacagaccggtcccagcgtttgacgctgcggttcatccctgtggaccgtgaggatactgcgtactcgtacaaggcgcggttcaccctagctgtgggtgataaccgtgtgctggacatggcttccacgtactttgacatccgcggcgtgctggacaggggccctacttttaagccctactctggcactgcctacaacgccctggctcccaagggtgccccaaatccttgcgaatgggatgaagctgctactgctcttgaaataaacctagaagaagaggacgatgacaacgaagacgaagtagacgagcaagctgagcagcaaaaaactcacgtatttgggcaggcgccttattctggtataaatattacaaaggagggtattcaaataggtgtcgaaggtcaaacacctaaatatgccgataaaacatttcaacctgaacctcaaataggagaatctcagtggtacgaaactgaaattaatcatgcagctgggagagtccttaaaaagactaccccaatgaaaccatgttacggttcatatgcaaaacccacaaatgaaaatggagggcaaggcattcttgtaaagcaacaaaatggaaagctagaaagtcaagtggaaatgcaatttttctcaactactgaggcgaccgcaggcaatggtgataacttgactcctaaagtggtattgtacagtgaagatgtagatatagaaaccccagacactcatatttcttacatgcccactattaaggaaggtaactcacgagaactaatgggccaacaatctatgcccaacaggcctaattacattgcttttagggacaattttattggtctaatgtattacaacagcacgggtaatatgggtgttctggcgggccaagcatcgcagttgaatgctgttgtagatttgcaagacagaaacacagagctttcataccagcttttgcttgattccattggtgatagaaccaggtacttttctatgtggaatcaggctgttgacagctatgatccagatgttagaattattgaaaatcatggaactgaagatgaacttccaaattactgctttccactgggaggtgtgattaatacagagactcttaccaaggtaaaacctaaaacaggtcaggaaaatggatgggaaaaagatgctacagaattttcagataaaaatgaaataagagttggaaataattttgccatggaaatcaatctaaatgccaacctgtggagaaatttcctgtactccaacatagcgctgtatttgcccgacaagctaaagtacagtccttccaacgtaaaaatttctgataacccaaacacctacgactacatgaacaagcgagtggtggctcccgggttagtggactgctacattaaccttggagcacgctggtcccttgactatatggacaacgtcaacccatttaaccaccaccgcaatgctggcctgcgctaccgctcaatgttgctgggcaatggtcgctatgtgcccttccacatccaggtgcctcagaagttctttgccattaaaaacctccttctcctgccgggctcatacacctacgagtggaacttcaggaaggatgttaacatggttctgcagagctccctaggaaatgacctaagggttgacggagccagcattaagtttgatagcatttgcctttacgccaccttcttccccatggcccacaacaccgcctccacgcttgaggccatgcttagaaacgacaccaacgaccagtcctttaacgactatctctccgccgccaacatgctctaccctatacccgccaacgctaccaacgtgcccatatccatcccctcccgcaactgggcggctttccgcggctgggccttcacgcgccttaagactaaggaaaccccatcactgggctcgggctacgacccttattacacctactctggctctataccctacctagatggaaccttttacctcaaccacacctttaagaaggtggccattacctttgactcttctgtcagctggcctggcaatgaccgcctgcttacccccaacgagtttgaaattaagcgctcagttgacggggagggttacaacgttgcccagtgtaacatgaccaaagactggttcctggtacaaatgctagctaactacaacattggctaccagggcttctatatcccagagagctacaaggaccgcatgtactccttctttagaaacttccagcccatgagccgtcaggtggtggatgatactaaatacaaggactaccaacaggtgggcatcctacaccaacacaacaactctggatttgttggctaccttgcccccaccatgcgcgaaggacaggcctaccctgctaacttcccctatccgcttataggcaagaccgcagttgacagcattacccagaaaaagtttctttgcgatcgcaccctttggcgcatcccattctccagtaactttatgtccatgggcgcactcacagacctgggccaaaaccttctctacgccaactccgcccacgcgctagacatgacttttgaggtggatcccatggacgagcccacccttctttatgttttgtttgaagtctttgacgtggtccgtgtgcaccggccgcaccgcggcgtcatcgaaaccgtgtacctgcgcacgcccttctcggccggcaacgccacaacataaagaagcaagcaacatcaacaacagctgccgccatgggctccagtgagcaggaactgaaagccattgtcaaagatcttggttgtgggccatattttttgggcacctatgacaagcgctttccaggctttgtttctccacacaagctcgcctgcgccatagtcaatacggccggtcgcgagactgggggcgtacactggatggcctttgcctggaacccgcactcaaaaacatgctacctctttgagccctttggcttttctgaccagcgactcaagcaggtttaccagtttgagtacgagtcactcctgcgccgtagcgccattgcttcttcccccgaccgctgtataacgctggaaaagtccacccaaagcgtacaggggcccaactcggccgcctgtggactattctgctgcatgtttctccacgcctttgccaactggccccaaactcccatggatcacaaccccaccatgaaccttattaccggggtacccaactccatgctcaacagtccccaggtacagcccaccctgcgtcgcaaccaggaacagctctacagcttcctggagcgccactcgccctacttccgcagccacagtgcgcagattaggagcgccacttctttttgtcacttgaaaaacatgtaaaaataatgtactagagacactttcaataaaggcaaatgcttttatttgtacactctcgggtgattatttacccccacccttgccgtctgcgccgtttaaaaatcaaaggggttctgccgcgcatcgctatgcgccactggcagggacacgttgcgatactggtgtttagtgctccacttaaactcaggcacaaccatccgcggcagctcggtgaagttttcactccacaggctgcgcaccatcaccaacgcgtttagcaggtcgggcgccgatatcttgaagtcgcagttggggcctccgccctgcgcgcgcgagttgcgatacacagggttgcagcactggaacactatcagcgccgggtggtgcacgctggccagcacgctcttgtcggagatcagatccgcgtccaggtcctccgcgttgctcagggcgaacggagtcaactttggtagctgccttcccaaaaagggcgcgtgcccaggctttgagttgcactcgcaccgtagtggcatcaaaaggtgaccgtgcccggtctgggcgttaggatacagcgcctgcataaaagccttgatctgcttaaaagccacctgagcctttgcgccttcagagaagaacatgccgcaagacttgccggaaaactgattggccggacaggccgcgtcgtgcacgcagcaccttgcgtcggtgttggagatctgcaccacatttcggccccaccggttcttcacgatcttggccttgctagactgctccttcagcgcgcgctgcccgttttcgctcgtcacatccatttcaatcacgtgctccttatttatcataatgcttccgtgtagacacttaagctcgccttcgatctcagcgcagcggtgcagccacaacgcgcagcccgtgggctcgtgatgcttgtaggtcacctctgcaaacgactgcaggtacgcctgcaggaatcgccccatcatcgtcacaaaggtcttgttgctggtgaaggtcagctgcaacccgcggtgctcctcgttcagccaggtcttgcatacggccgccagagcttccacttggtcaggcagtagtttgaagttcgcctttagatcgttatccacgtggtacttgtccatcagcgcgcgcgcagcctccatgcccttctcccacgcagacacgatcggcacactcagcgggttcatcaccgtaatttcactttccgcttcgctgggctcttcctcttcctcttgcgtccgcataccacgcgccactgggtcgtcttcattcagccgccgcactgtgcgcttacctcctttgccatgcttgattagcaccggtgggttgctgaaacccaccatttgtagcgccacatcttctctttcttcctcgctgtccacgattacctctggtgatggcgggcgctcgggcttgggagaagggcgcttctttttcttcttgggcgcaatggccaaatccgccgccgaggtcgatggccgcgggctgggtgtgcgcggcaccagcgcgtcttgtgatgagtcttcctcgtcctcggactcgatacgccgcctcatccgcttttttgggggcgcccggggaggcggcggcgacggggacggggacgacacgtcctccatggttgggggacgtcgcgccgcaccgcgtccgcgctcgggggtggtttcgcgctgctcctcttcccgactggccatttccttctcctataggcagaaaaagatcatggagtcagtcgagaagaaggacagcctaaccgccccctctgagttcgccaccaccgcctccaccgatgccgccaacgcgcctaccaccttccccgtcgaggcacccccgcttgaggaggaggaagtgattatcgagcaggacccaggttttgtaagcgaagacgacgaggaccgctcagtaccaacagaggataaaaagcaagaccaggacaacgcagaggcaaacgaggaacaagtcgggcggggggacgaaaggcatggcgactacctagatgtgggagacgacgtgctgttgaagcatctgcagcgccagtgcgccattatctgcgacgcgttgcaagagcgcagcgatgtgcccctcgccatagcggatgtcagccttgcctacgaacgccacctattctcaccgcgcgtaccccccaaacgccaagaaaacggcacatgcgagcccaacccgcgcctcaacttctaccccgtatttgccgtgccagaggtgcttgccacctatcacatctttttccaaaactgcaagatacccctatcctgccgtgccaaccgcagccgagcggacaagcagctggccttgcggcagggcgctgtcatacctgatatcgcctcgctcaacgaagtgccaaaaatctttgagggtcttggacgcgacgagaagcgcgcggcaaacgctctgcaacaggaaaacagcgaaaatgaaagtcactctggagtgttggtggaactcgagggtgacaacgcgcgcctagccgtactaaaacgcagcatcgaggtcacccactttgcctacccggcacttaacctaccccccaaggtcatgagcacagtcatgagtgagctgatcgtgcgccgtgcgcagcccctggagagggatgcaaatttgcaagaacaaacagaggagggcctacccgcagttggcgacgagcagctagcgcgctggcttcaaacgcgcgagcctgccgacttggaggagcgacgcaaactaatgatggccgcagtgctcgttaccgtggagcttgagtgcatgcagcggttctttgctgacccggagatgcagcgcaagctagaggaaacattgcactacacctttcgacagggctacgtacgccaggcctgcaagatctccaacgtggagctctgcaacctggtctcctaccttggaattttgcacgaaaaccgccttgggcaaaacgtgcttcattccacgctcaagggcgaggcgcgccgcgactacgtccgcgactgcgtttacttatttctatgctacacctggcagacggccatgggcgtttggcagcagtgcttggaggagtgcaacctcaaggagctgcagaaactgctaaagcaaaacttgaaggacctatggacggccttcaacgagcgctccgtggccgcgcacctggcggacatcattttccccgaacgcctgcttaaaaccctgcaacagggtctgccagacttcaccagtcaaagcatgttgcagaactttaggaactttatcctagagcgctcaggaatcttgcccgccacctgctgtgcacttcctagcgactttgtgcccattaagtaccgcgaatgccctccgccgctttggggccactgctaccttctgcagctagccaactaccttgcctaccactctgacataatggaagacgtgagcggtgacggtctactggagtgtcactgtcgctgcaacctatgcaccccgcaccgctccctggtttgcaattcgcagctgcttaacgaaagtcaaattatcggtacctttgagctgcagggtccctcgcctgacgaaaagtccgcggctccggggttgaaactcactccggggctgtggacgtcggcttaccttcgcaaatttgtacctgaggactaccacgcccacgagattaggttctacgaagaccaatcccgcccgccaaatgcggagcttaccgcctgcgtcattacccagggccacattcttggccaattgcaagccatcaacaaagcccgccaagagtttctgctacgaaagggacggggggtttacttggacccccagtccggcgaggagctcaacccaatccccccgccgccgcagccctatcagcagcagccgcgggcccttgcttcccaggatggcacccaaaaagaagctgcagctgccgccgccacccacggacgaggaggaatactgggacagtcaggcagaggaggttttggacgaggaggaggaggacatgatggaagactgggagagcctagacgaggaagcttccgaggtcgaagaggtgtcagacgaaacaccgtcaccctcggtcgcattcccctcgccggcgccccagaaatcggcaaccggttccagcatggctacaacctccgctcctcaggcgccgccggcactgcccgttcgccgacccaaccgtagatgggacaccactggaaccagggccggtaagtccaagcagccgccgccgttagcccaagagcaacaacagcgccaaggctaccgctcatggcgcgggcacaagaacgccatagttgcttgcttgcaagactgtgggggcaacatctccttcgcccgccgctttcttctctaccatcacggcgtggccttcccccgtaacatcctgcattactaccgtcatctctacagcccatactgcaccggcggcagcggcagcggcagcaacagcagcggccacacagaagcaaaggcgaccggatagcaagactctgacaaagcccaagaaatccacagcggcggcagcagcaggaggaggagcgctgcgtctggcgcccaacgaacccgtatcgacccgcgagcttagaaacaggatttttcccactctgtatgctatatttcaacagagcaggggccaagaacaagagctgaaaataaaaaacaggtctctgcgatccctcacccgcagctgcctgtatcacaaaagcgaagatcagcttcggcgcacgctggaagacgcggaggctctcttcagtaaatactgcgcgctgactcttaaggactagtttcgcgccctttctcaaatttaagcgcgaaaactacgtcatctccagcggccacacccggcgccagcacctgtcgtcagcgccattatgagcaaggaaattcccacgccctacatgtggagttaccagccacaaatgggacttgcggctggagctgcccaagactactcaacccgaataaactacatgagcgcgggaccccacatgatatcccgggtcaacggaatccgcgcccaccgaaaccgaattctcttggaacaggcggctattaccaccacacctcgtaataaccttaatccccgtagttggcccgctgccctggtgtaccaggaaagtcccgctcccaccactgtggtacttcccagagacgcccaggccgaagttcagatgactaactcaggggcgcagcttgcgggcggctttcgtcacagggtgcggtcgcccgggcagggtataactcacctgacaatcagagggcgaggtattcagctcaacgacgagtcggtgagctcctcgcttggtctccgtccggacgggacatttcagatcggcggcgccggccgtccttcattcacgcctcgtcaggcaatcctaactctgcagacctcgtcctctgagccgcgctctggaggcattggaactctgcaatttattgaggagtttgtgccatcggtctactttaaccccttctcgggacctcccggccactatccggatcaatttattcctaactttgacgcggtaaaggactcggcggacggctacgactgaatgttaagtggagaggcagagcaactgcgcctgaaacacctggtccactgtcgccgccacaagtgctttgcccgcgactccggtgagttttgctactttgaattgcccgaggatcatatcgagggcccggcgcacggcgtccggcttaccgcccagggagagcttgcccgtagcctgattcgggagtttacccagcgccccctgctagttgagcgggacaggggaccctgtgttctcactgtgatttgcaactgtcctaaccttggattacatcaagatctttgttgccatctctgtgctgagtataataaatacagaaattaaaatatactggggctcctatcgccatcctgtaaacgccaccgtcttcacccgcccaagcaaaccaaggcgaaccttacctggtacttttaacatctctccctctgtgatttacaacagtttcaacccagacggagtgagtctacgagagaacctctccgagctcagctactccatcagaaaaaacaccaccctccttacctgccgggaacgtacgagtgcgtcaccggccgctgcaccacacctaccgcctgaccgtaaaccagactttttccggacagacctcaataactctgtttaccagaacaggaggtgagcttagaaaacccttagggtattaggccaaaggcgcagctactgtggggtttatgaacaattcaagcaactctacgggctattctaattcaggtttctctagaatcggggttggggttattctctgtcttgtgattctctttattcttatactaacgcttctctgcctaaggctcgccgcctgctgtgtgcacatttgcatttattgtcagctttttaaacgctggggtcgccacccaagatgattaggtacataatcctaggtttactcacccttgcgtcagcccacggtaccacccaaaaggtggattttaaggagccagcctgtaatgttacattcgcagctgaagctaatgagtgcaccactcttataaaatgcaccacagaacatgaaaagctgcttattcgccacaaaaacaaaattggcaagtatgctgtttatgctatttggcagccaggtgacactacagagtataatgttacagttttccagggtaaaagtcataaaacttttatgtatacttttccattttatgaaatgtgcgacattaccatgtacatgagcaaacagtataagttgtggcccccacaaaattgtgtggaaaacactggcactttctgctgcactgctatgctaattacagtgctcgctttggtctgtaccctactctatattaaatacaaaagcagacgcagctttattgaggaaaagaaaatgccttaatttactaagttacaaagctaatgtcaccactaactgctttactcgctgcttgcaaaacaaattcaaaaagttagcattataattagaataggatttaaaccccccggtcatttcctgctcaataccattcccctgaacaattgactctatgtgggatatgctccagcgctacaaccttgaagtcaggcttcctggatgtcagcatctgactttggccagcacctgtcccgcggatttgttccagtccaactacagcgacccaccctaacagagatgaccaacacaaccaacgcggccgccgctaccggacttacatctaccacaaatacaccccaagtttctgcctttgtcaataactgggataacttgggcatgtggtggttctccatagcgcttatgtttgtatgccttattattatgtggctcatctgctgcctaaagcgcaaacgcgcccgaccacccatctatagtcccatcattgtgctacacccaaacaatgatggaatccatagattggacggactgaaacacatgttcttttctcttacagtatgattaaatgagacatgattcctcgagtttttatattactgacccttgttgcgcttttttgtgcgtgctccacattggctgcggtttctcacatcgaagtagactgcattccagccttcacagtctatttgctttacggatttgtcaccctcacgctcatctgcagcctcatcactgtggtcatcgcctttatccagtgcattgactgggtctgtgtgcgctttgcatatctcagacaccatccccagtacagggacaggactatagctgagcttcttagaattctttaattatgaaatttactgtgacttttctgctgattatttgcaccctatctgcgttttgttccccgacctccaagcctcaaagacatatatcatgcagattcactcgtatatggaatattccaagttgctacaatgaaaaaagcgatctttccgaagcctggttatatgcaatcatctctgttatggtgttctgcagtaccatcttagccctagctatatatccctaccttgacattggctggaaacgaatagatgccatgaaccacccaactttccccgcgcccgctatgcttccactgcaacaagttgttgccggcggctttgtcccagccaatcagcctcgccccacttctcccacccccactgaaatcagctactttaatctaacaggaggagatgactgacaccctagatctagaaatggacggaattattacagagcagcgcctgctagaaagacgcagggcagcggccgagcaacagcgcatgaatcaagagctccaagacatggttaacttgcaccagtgcaaaaggggtatcttttgtctggtaaagcaggccaaagtcacctacgacagtaataccaccggacaccgccttagctacaagttgccaaccaagcgtcagaaattggtggtcatggtgggagaaaagcccattaccataactcagcactcggtagaaaccgaaggctgcattcactcaccttgtcaaggacctgaggatctctgcacccttattaagaccctgtgcggtctcaaagatcttattccctttaactaataaaaaaaaataataaagcatcacttacttaaaatcagttagcaaatttctgtccagtttattcagcagcacctccttgccctcctcccagctctggtattgcagcttcctcctggctgcaaactttctccacaatctaaatggaatgtcagtttcctcctgttcctgtccatccgcacccactatcttcatgttgttgcagatgaagcgcgcaagaccgtctgaagataccttcaaccccgtgtatccatatgacacggaaaccggtcctccaactgtgccttttcttactcctccctttgtatcccccaatgggtttcaagagagtccccctggggtactctctttgcgcctatccgaacctctagttacctccaatggcatgcttgcgctcaaaatgggcaacggcctctctctggacgaggccggcaaccttacctcccaaaatgtaaccactgtgagcccacctctcaaaaaaaccaagtcaaacataaacctggaaatatctgcacccctcacagttacctcagaagccctaactgtggctgccgccgcacctctaatggtcgcgggcaacacactcaccatgcaatcacaggccccgctaaccgtgcacgactccaaacttagcattgccacccaaggacccctcacagtgtcagaaggaaagctagccctgcaaacatcaggccccctcaccaccaccgatagcagtacccttactatcactgcctcaccccctctaactactgccactggtagcttgggcattgacttgaaagagcccatttatacacaaaatggaaaactaggactaaagtacggggctcctttgcatgtaacagacgacctaaacactttgaccgtagcaactggtccaggtgtgactattaataatacttccttgcaaactaaagttactggagccttgggttttgattcacaaggcaatatgcaacttaatgtagcaggaggactaaggattgattctcaaaacagacgccttatacttgatgttagttatccgtttgatgctcaaaaccaactaaatctaagactaggacagggccctctttttataaactcagcccacaacttggatattaactacaacaaaggcctttacttgtttacagcttcaaacaattccaaaaagcttgaggttaacctaagcactgccaaggggttgatgtttgacgctacagccatagccattaatgcaggagatgggcttgaatttggttcacctaatgcaccaaacacaaatcccctcaaaacaaaaattggccatggcctagaatttgattcaaacaaggctatggttcctaaactaggaactggccttagttttgacagcacaggtgccattacagtaggaaacaaaaataatgataagctaactttgtggaccacaccagctccatctcctaactgtagactaaatgcagagaaagatgctaaactcactttggtcttaacaaaatgtggcagtcaaatacttgctacagtttcagttttggctgttaaaggcagtttggctccaatatctggaacagttcaaagtgctcatcttattataagatttgacgaaaatggagtgctactaaacaattccttcctggacccagaatattggaactttagaaatggagatcttactgaaggcacagcctatacaaacgctgttggatttatgcctaacctatcagcttatccaaaatctcacggtaaaactgccaaaagtaacattgtcagtcaagtttacttaaacggagacaaaactaaacctgtaacactaaccattacactaaacggtacacaggaaacaggagacacaactccaagtgcatactctatgtcattttcatgggactggtctggccacaactacattaatgaaatatttgccacatcctcttacactttttcatacattgcccaagaataaagaatcgtttgtgttatgtttcaacgtgtttatttttcaattgcagaaaatttcaagtcatttttcattcagtagtatagccccaccaccacatagcttatacagatcaccgtaccttaatcaaactcacagaaccctagtattcaacctgccacctccctcccaacacacagagtacacagtcctttctccccggctggccttaaaaagcatcatatcatgggtaacagacatattcttaggtgttatattccacacggtttcctgtcgagccaaacgctcatcagtgatattaataaactccccgggcagctcacttaagttcatgtcgctgtccagctgctgagccacaggctgctgtccaacttgcggttgcttaacgggcggcgaaggagaagtccacgcctacatgggggtagagtcataatcgtgcatcaggatagggcggtggtgctgcagcagcgcgcgaataaactgctgccgccgccgctccgtcctgcaggaatacaacatggcagtggtctcctcagcgatgattcgcaccgcccgcagcataaggcgccttgtcctccgggcacagcagcgcaccctgatctcacttaaatcagcacagtaactgcagcacagcaccacaatattgttcaaaatcccacagtgcaaggcgctgtatccaaagctcatggcggggaccacagaacccacgtggccatcataccacaagcgcaggtagattaagtggcgacccctcataaacacgctggacataaacattacctcttttggcatgttgtaattcaccacctcccggtaccatataaacctctgattaaacatggcgccatccaccaccatcctaaaccagctggccaaaacctgcccgccggctatacactgcagggaaccgggactggaacaatgacagtggagagcccaggactcgtaaccatggatcatcatgctcgtcatgatatcaatgttggcacaacacaggcacacgtgcatacacttcctcaggattacaagctcctcccgcgttagaaccatatcccagggaacaacccattcctgaatcagcgtaaatcccacactgcagggaagacctcgcacgtaactcacgttgtgcattgtcaaagtgttacattcgggcagcagcggatgatcctccagtatggtagcgcgggtttctgtctcaaaaggaggtagacgatccctactgtacggagtgcgccgagacaaccgagatcgtgttggtcgtagtgtcatgccaaatggaacgccggacgtagtcatatttcctgaagcaaaaccaggtgcgggcgtgacaaacagatctgcgtctccggtctcgccgcttagatcgctctgtgtagtagttgtagtatatccactctctcaaagcatccaggcgccccctggcttcgggttctatgtaaactccttcatgcgccgctgccctgataacatccaccaccgcagaataagccacacccagccaacctacacattcgttctgcgagtcacacacgggaggagcgggaagagctggaagaaccatgtttttttttttattccaaaagattatccaaaacctcaaaatgaagatctattaagtgaacgcgctcccctccggtggcgtggtcaaactctacagccaaagaacagataatggcatttgtaagatgttgcacaatggcttccaaaaggcaaacggccctcacgtccaagtggacgtaaaggctaaacccttcagggtgaatctcctctataaacattccagcaccttcaaccatgcccaaataattctcatctcgccaccttctcaatatatctctaagcaaatcccgaatattaagtccggccattgtaaaaatctgctccagagcgccctccaccttcagcctcaagcagcgaatcatgattgcaaaaattcaggttcctcacagacctgtataagattcaaaagcggaacattaacaaaaataccgcgatcccgtaggtcccttcgcagggccagctgaacataatcgtgcaggtctgcacggaccagcgcggccacttccccgccaggaaccatgacaaaagaacccacactgattatgacacgcatactcggagctatgctaaccagcgtagccccgatgtaagcttgttgcatgggcggcgatataaaatgcaaggtgctgctcaaaaaatcaggcaaagcctcgcgcaaaaaagaaagcacatcgtagtcatgctcatgcagataaaggcaggtaagctccggaaccaccacagaaaaagacaccatttttctctcaaacatgtctgcgggtttctgcataaacacaaaataaaataacaaaaaaacatttaaacattagaagcctgtcttacaacaggaaaaacaacccttataagcataagacggactacggccatgccggcgtgaccgtaaaaaaactggtcaccgtgattaaaaagcaccaccgacagctcctcggtcatgtccggagtcataatgtaagactcggtaaacacatcaggttgattcacatcggtcagtgctaaaaagcgaccgaaatagcccgggggaatacatacccgcaggcgtagagacaacattacagcccccataggaggtataacaaaattaataggagagaaaaacacataaacacctgaaaaaccctcctgcctaggcaaaatagcaccctcccgctccagaacaacatacagcgcttccacagcggcagccataacagtcagccttaccagtaaaaaagaaaacctattaaaaaaacaccactcgacacggcaccagctcaatcagtcacagtgtaaaaaagggccaagtgcagagcgagtatatataggactaaaaaatgacgtaacggttaaagtccacaaaaaacacccagaaaaccgcacgcgaacctacgcccagaaacgaaagccaaaaaacccacaacttcctcaaatcgtcacttccgttttcccacgttacgtaacttcccattttaagaaaactacaattcccaacacatacaagttactccgccctaaaacctacgtcacccgccccgttcccacgccccgcgccacgtcacaaactccaccccctcattatcatattggcttcaatccaaaataaggtatattattgatgatg

SEQ ID NO: 733 - DNA, 34794 bp, Adeno Virus
catcatcaataatataccttatagatggaatggtgccaatatgtaaatgaggtgattttaaaaagtgtggatcgtgtggtgattggctgtggggttaacggctaaaaggggcggtgcgaccgtgggaaaatgacgttttgtgggggtggagtttttttgcaagttgtcgcgggaaatgtgacgcataaaaaggcttttttctcacggaactacttagttttcccacggtatttaacaggaaatgaggtagttttgaccggatgcaagtgaaaattgttgattttcgcgcgaaaactgaatgaggaagtgtttttctgaataatgtggtatttatggcagggtggagtatttgttcagggccaggtagactttgacccattacgtggaggtttcgattaccgtgttttttacctgaatttccgcgtaccgtgtcaaagtcttctgtttttacgtaggtgtcagctgatcgctagggtatttatacctcagggtttgtgtcaagaggccactcttgagtgccagcgagaagagttttctcctctgcgccggcagtttaataataaaaaaatgagagatttgcgatttctgcctcaggaaataatctctgctgagactggaaatgaaatattggagcttgtggtgcacgccctgatgggagacgatccggagccacctgtgcagctttttgagcctcctacgcttcaggaactgtatgatttagaggtagagggatcggaggattctaatgaggaagctgtaaatggcttttttaccgattctatgcttttagctgctaatgaagggttagaattagatccgcctttggacacttttgatactccaggggtaattgtggaaagcggtacaggtgtaagaaaattacctgatttgagttccgtggactgtgatttgcactgctatgaagacgggtttcctccgagtgatgaggaggaccatgaaaaggagcagtccatgcagactgcagcgggtgagggagtgaaggctgccaatgttggttttcagttggattgcccggagcttcctggacatggctgtaagtcttgtgaatttcacaggaaaaatactggagtaaaggaactgttatgttcgctttgttatatgagaacgcactgccactttatttacagtaagtgtgtttaagttaaaatttaaaggaatatgctgtttttcacatgtatattgagtgtgagttttgtgcttcttattataggtcctgtgtctgatgctgatgaatcaccatctcctgattctactacctcacctcctgagattcaagcacctgttcctgtggacgtgcgcaagcccattcctgtgaagcttaagcctgggaaacgtccagcagtggaaaaacttgaggacttgttacagggtggggacggacctttggacttgagtacacggaaacgtccaagacaataagtgttccatatccgtgtttacttaaggtgacgtcaatatttgtgtgacagtgcaatgtaataaaaatatgttaactgttcactggtttttattgctttttgggcggggactcaggtatataagtagaagcagacctgtgtggttagctcataggagctggctttcatccatggaggtttgggccattttggaagaccttaggaagactaggcaactgttagagaacgcttcggacggagtctccggtttttggagattctggttcgctagtgaattagctagggtagtttttaggataaaacaggactataaccaagaatttgaaaagttgttggtagattgcccaggactttttgaagctcttaatttgggccatcaggttcactttaaagaaaaagttttatcagttttagacttttcaaccccaggtagaactgctgctgctgtggcttttcttacttttatattagataaatggatcccgcagactcatttcagcaggggatacgttttggatttcatagccacagcattgtggagaacatggaaggttcgcaagatgaggacaatcttaggttactggccagtgcagcctttgggtgtagcgggaatcctgaggcatccaccggtcatgccagcggttctggaggaggaacagcaagaggacaacccgagagccggcctggaccctccagtggaggaggcggagtagctgacttgtctcctgaactgcaacgggtgcttactggatctacgtccactggacgggataggggcgttaagagggagagggcatctagtggtactgatgctagatctgagttggctttaagtttaatgagtcgcagacgtcctgaaaccatttggtggcatgaggttcagaaagagggaagggatgaagtttctgtattgcaggagaaatattcactggaacaggtgaaaacatgttggttggagcctgaggatgattgggaggtggccattaaaaattatgccaagatagctttgaggcctgataaacagtataagattactagacggattaatatccggaatgcttgttacatatctggaaatggggctgaggtggtaatagatactcaagacaaggcagttattagatgctgcatgatggatatgtggcctggggtagtcggtatggaagcagtaacttttgtaaatgttaagtttaggggagatggttataatggaatagtgtttatggccaataccaaacttatattgcatggttgtagcttttttggtttcaacaatacctgtgtagatgcctggggacaggttagtgtacggggatgtagtttctatgcgtgttggattgccacagctggcagaaccaagagtcaattgtctctgaagaaatgcatatttcaaagatgtaacctgggcattctgaatgaaggcgaagcaagggtccgccactgcgcttctacagatactggatgttttattttgattaagggaaatgccagcgtaaagcataacatgatttgcggtgcttccgatgagaggccttatcaaatgctcacttgtgctggtgggcattgtaatatgctggctactgtgcatattgtttcccatcaacgcaaaaaatggcctgtttttgatcacaatgtgatgacgaagtgtaccatgcatgcaggtgggcgtagaggaatgtttatgccttaccagtgtaacatgaatcatgtgaaagtgttgttggaaccagatgccttttccagaatgagcctaacaggaatttttgacatgaacatgcaaatctggaagatcctgaggtatgatgatacgagatcgagggtacgcgcatgcgaatgcggaggcaagcatgccaggttccagccggtgtgtgtagatgtgactgaagatctcagaccggatcatttggttattgcccgcactggagcagagttcggatccagtggagaagaaactgactaaggtgagtattgggaaaactttggggtgggattttcagatggacagattgagtaaaaatttgttttttctgtcttgcagctgtcatgagtggaaacgcttcttttaaggggggagtcttcagcccttatctgacagggcgtctcccatcctgggcaggagttcgtcagaatgttatgggatctactgtggatggaagacccgtccaacccgccaattcttcaacgctgacctatgctactttaagttcttcacctttggacgcagctgcagctgccgccgccgcttctgttgccgctaacactgtgcttggaatgggttactatggaagcatcatggctaattccacttcctctaataacccttctaccctgactcaggacaagttacttgtccttttggcccagctggaggctttgacccaacgtctgggtgaactttctcagcaggtggtcgagttgcgagtacaaactgagtctgctgtcggcacggcaaagtctaaataaaaaaatcccagaatcaatgaataaataaacaagcttgttgttgatttaaaatcaagtgtttttatttcatttttcgcgcacggtatgccctagaccaccgatctctatcattgagaactcggtggattttttccaggatcctatagaggtgggattgaatgtttagatacatgggcattaggccgtctttggggtggagatagctccattgaagggattcatgctccggggtagtgttgtaaatcacccagtcataacaaggtcgcagtgcatggtgttgcacaatatcttttagaagtaggctgattgccacagataagcccttggtgtaggtgtttacaaaccggttgagctgggatgggtgcattcggggtgaaattatgtgcattttggattggatttttaagttggcaatattgccgccaagatcccgtcttgggttcatgttatgaaggaccaccaagacggtgtatccggtacatttaggaaatttatcgtgcagcttggatggaaaagcgtggaaaaatttggagacacccttgtgtcctccaagattttccatgcactcatccatgataatagcaatggggccgtgggcagcggcgcgggcaaacacgttccgtgggtctgacacatcatagttatgttcctgagttaaatcatcataagccattttaatgaatttggggcggagagtaccagattggggtatgaatgttccttcgggccccggagcatagttcccctcacagatttgcatttcccaagctttcagttccgagggtggaatcatgtccacctggggggctatgaaaaacaccgtttctggggcgggggtgattaattgtgatgatagcaaatttctgagcaattgagatttgccacatccggtggggccataaatgattccgattacgggttgcaggtggtagtttagggaacggcaactgccgtcttctcgaagcaagggggccacctcgttcatcatttcccttacatgcatattttcccgcaccaaatccattaggaggcgctctcctcctagtgatagaagttcttgtagtgaggaaaagtttttcagcggtttcagaccgtcagccatgggcattttggagagagtttgctgcaaaagttctagtctgttccacagttcagtgatgtgttctatggcatctcgatccagcagacctcctcgtttcgcgggtttggacggctcctggaatagggtatgagacgatgggcgtccagcgctgccagggttcggtccttccagggtctcagtgttcgagtcagggttgtttccgtcacagtgaaggggtgtgcgcctgcttgggcgcttgccagggtgcgcttcagactcatcctgctggtcgaaaacttctgtcgcttggcgccctgtatgtcggccaagtagcagtttaccatgagttcgtagttgagcgcctcggctgcgtggcctttggcgcggagcttacctttggaagttttcttgcataccgggcagtataggcatttcagcgcatacaacttgggcgcaaggaaaacggattctggggagtatgcatctgcgccgcaggaggcgcaaacagtttcacattccaccagccaggttaaatccggttcattggggtcaaaaacaagttttccgccatattttttgatgcgtttcttacctttggtctccatgagttcgtgtcctcgttgagtgacaaacaggctgtccgtgtccccgtagactgattttacaggcctcttctccagtggagtgcctcggtcttcttcgtacaggaactctgaccactctgatacaaaggcgcgcgtccaggccagcacaaaggaggctatgtgggaggggtagcgatcgttgtcaaccagggggtccaccttttccaaagtatgcaaacacatgtcaccctcttcaacatccaggaatgtgattggcttgtaggtgtatttcacgtgacctggggtccccgctgggggggtataaaagggggcggttctttgctcttcctcactgtcttccggatcgctgtccaggaacgtcagctgttggggtaggtattccctctcgaaggcgggcatgacctctgcactcaggttgtcagtttctaagaacgaggaggatttgatattgacagtgccggttgagatgcctttcatgaggttttcgtccatttggtcagaaaacacaatttttttattgtcaagtttggtggcaaatgatccatacagggcgttggataaaagtttggcaatggatcgcatggtttggttcttttccttgtccgcgcgctctttggcggcgatgttgagttggacatactcgcgtgccaggcacttccattcggggaagatagttgttaattcatctggcacgattctcacttgccaccctcgattatgcaaggtaattaaatccacactggtggccacctcgcctcgaaggggttcattggtccaacagagcctacctcctttcctagaacagaaagggggaagtgggtctagcataagttcatcgggagggtctgcatccatggtaaagattcccggaagtaaatccttatcaaaatagctgatgggagtggggtcatctaaggccatttgccattctcgagctgccagtgcgcgctcatatgggttaaggggactgccccatggcatgggatgggtgagtgcagaggcatacatgccacagatgtcatagacgtagatgggatcctcaaagatgcctatgtaggttggatagcatcgcccccctctgatacttgctcgcacatagtcatatagttcatgtgatggcgctagcagccccggacccaagttggtgcgattgggtttttctgttctgtagacgatctggcgaaagatggcgtgagaattggaagagatggtgggtctttgaaaaatgttgaaatgggcatgaggtagacctacagagtctctgacaaagtgggcataagattcttgaagcttggttaccagttcggcggtgacaagtacgtctagggcgcagtagtcaagtgtttcttgaatgatgtcataacctggttggtttttcttttcccacagttcgcggttgagaaggtattcttcgcgatccttccagtactcttctagcggaaacccgtctttgtctgcacggtaagatcctagcatgtagaactgattaactgccttgtaagggcagcagcccttctctacgggtagagagtatgcttgagcagcttttcgtagcgaagcgtgagtaagggcaaaggtgtctctgaccatgactttgagaaattggtatttgaagtcgatgtcgtcacaggctccctgttcccagagttggaagtctacccgtttcttgtaggcggggttgggcaaagcgaaagtaacatcattgaagagaatcttaccggctctgggcataaaattgcgagtgatgcgaaaaggctgtggtacttccgctcgattgttgatcacctgggcagctaggacgatctcgtcgaaaccgttgatgttgtgtcctacgatgtataattctatgaaacgcggcgtgcctctgacgtgaggtagcttactgagctcatcaaaggttaggtctgtggggtcagataaggcgtagtgttcgagagcccattcgtgcaggtgaggatttgcatgtaggaatgatgaccaaagatctaccgccagtgctgtttgtaactggtcccgatactgacgaaaatgccggccaattgccattttttctggagtgacacagtagaaggttctggggtcttgttgccatcgatcccacttgagtttaatggctagatcgtgggccatgttgacgagacgctcttctcctgagagtttcatgaccagcatgaaaggaactagttgtttgccaaaggatcccatccaggtgtaagtttccacatcgtaggtcaggaagagtctttctgtgcgaggatgagagccgatcgggaagaactggatttcctgccaccagttggaggattggctgttgatgtgatggaagtagaagtttctgcggcgcgccgagcattcgtgtttgtgcttgtacagacggccgcagtagtcgcagcgttgcacgggttgtatctcgtgaatgagttgtacctggcttcccttgacgagaaatttcagtgggaagccgaggcctggcgattgtatctcgtgctcttctatattcgctgtatcggcctgttcatcttctgtttcgatggtggtcatgctgacgagcccccgcgggaggcaagtccagacctcggcgcgggaggggcggagctgaaggacgagagcgcgcaggctggagctgtccagagtcctgagacgctgcggactcaggttagtaggtagggacagaagattaacttgcatgatcttttccagggcgtgcgggaggttcagatggtacttgatttccacaggttcgtttgtagagacgtcaatggcttgcagggttccgtgtcctttgggcgccactaccgtacctttgttttttcttttgatcggtggtggctctcttgcttcttgcatgctcagaagcggtgacggggacgcgcgccgggcggcagcggttgttccggacccgagggcatggctggtagtggcacgtcggcgccgcgcacgggcaggttctggtactgcgctctgagaagacttgcgtgcgccaccacgcgtcgattgacgtcttgtatctgacgtctctgggtgaaagctaccggccccgtgagcttgaacctgaaagagagttcaacagaatcaatttcggtatcgttaacggcagcttgtctcagtatttcttgtacgtcaccagagttgtcctggtaggcgatctccgccatgaactgctcgatttcttcctcctgaagatctccgcgacccgctctttcgacggtggccgcgaggtcattggagatacggcccatgagttgggagaatgcattcatgcccgcctcgttccagacgcggctgtaaaccacggccccctcggagtctcttgcgcgcatcaccacctgagcgaggttaagctccacgtgtctggtgaagaccgcatagttgcataggcgctgaaaaaggtagttgagtgtggtggcaatgtgttcggcgacgaagaaatacatgatccatcgtctcagcggcatttcgctaacatcgcccagagcttccaagcgctccatggcctcgtagaagtccacggcaaaattaaaaaactgggagtttcgcgcggacacggtcaattcctcctcgagaagacggatgagttcggctatggtggcccgtacttcgcgttcgaaggctcccgggatctcttcttcctcttctatctcttcttccactaacatctcttcttcgtcttcaggcgggggcggagggggcacgcggcgacgtcgacggcgcacgggcaaacggtcgatgaatcgttcaatgacctctccgcggcggcggcgcatggtttcagtgacggcgcggccgttctcgcgcggtcgcagagtaaaaacaccgccgcgcatctccttaaagtggtgactgggaggttctccgtttgggagggagagggcgctgattatacattttattaattggcccgtagggactgcacgcagagatctgatcgtgtcaagatccacgggatctgaaaacctttcgacgaaagcgtctaaccagtcacagtcacaaggtaggctgagtacggcttcttgtgggcgggggtggttatgtgttcggtctgggtcttctgtttcttcttcatctcgggaaggtgagacgatgctgctggtgatgaaattaaagtaggcagttctaagacggcggatggtggcgaggagcaccaggtctttgggtccggcttgctggatacgcaggcgattggccattccccaagcattatcctgacatctagcaagatctttgtagtagtcttgcatgagccgttctacgggcacttcttcctcacccgttctgccatgcatacgtgtgagtccaaatccgcgcattggttgtaccagtgccaagtcagctacgactctttcggcgaggatggcttgctgtacttgggtaagggtggcttgaaagtcatcaaaatccacaaagcggtggtaagctcctgtattaatggtgtaagcacagttggccatgactgaccagttaactgtctggtgaccagggcgcacgagctcggtgtatttaaggcgcgaataggcgcgggtgtcaaagatgtaatcgttgcaggtgcgcaccagatactggtaccctataagaaaatgcggcggtggttggcggtagagaggccatcgttctgtagctggagcgccaggggcgaggtcttccaacataaggcggtgatagccgtagatgtacctggacatccaggtgattcctgcggcggtagtagaagcccgaggaaactcgcgtacgcggttccaaatgttgcgtagcggcatgaagtagttcattgtaggcacggtttgaccagtgaggcgcgcgcagtcattgatgctctatagacacggagaaaatgaaagcgttcagcgactcgactccgtagcctggaggaacgtgaacgggttgggtcgcggtgtaccccggttcgagacttgtactcgagccggccggagccgcggctaacgtggtattggcactcccgtctcgacccagcctacaaaaatccaggatacggaatcgagtcgttttgctggtttccgaatggcagggaagtgagtcctattttttttttttgccgctcagatgcatcccgtgctgcgacagatgcgcccccaacaacagcccccctcgcagcagcagcagcagcaatcacaaaaggctgtccctgcaactactgcaactgccgccgtgagcggtgcgggacagcccgcctatgatctggacttggaagagggcgaaggactggcacgtctaggtgcgccttcacccgagcggcatccgcgagttcaactgaaaaaagattctcgcgaggcgtatgtgccccaacagaacctatttagagacagaagcggcgaggagccggaggagatgcgagcttcccgctttaacgcgggtcgtgagctgcgtcacggtttggaccgaagacgagtgttgcgggacgaggatttcgaagttgatgaaatgacagggatcagtcctgccagggcacacgtggctgcagccaaccttgtatcggcttacgagcagacagtaaaggaagagcgtaacttccaaaagtcttttaataatcatgtgcgaaccctgattgcccgcgaagaagttacccttggtttgatgcatttgtgggatttgatggaagctatcattcagaaccctactagcaaacctctgaccgcccagctgtttctggtggtgcaacacagcagagacaatgaggctttcagagaggcgctgctgaacatcaccgaacccgaggggagatggttgtatgatcttatcaacattctacagagtatcatagtgcaggagcggagcctgggcctggccgagaaggtggctgccatcaattactcggttttgagcttgggaaaatattacgctcgcaaaatctacaagactccatacgttcccatagacaaggaggtgaagatagatgggttctacatgcgcatgacgctcaaggtcttgaccctgagcgatgatcttggggtgtatcgcaatgacagaatgcatcgcgcggttagcgccagcaggaggcgcgagttaagcgacagggaactgatgcacagtttgcaaagagctctgactggagctggaaccgagggtgagaattacttcgacatgggagctgacttgcagtggcagcctagtcgcagggctctgagcgccgcgacggcaggatgtgagcttccttacatagaagaggcggatgaaggcgaggaggaagagggcgagtacttggaagactgatggcacaacccgtgttttttgctagatggaacagcaagcaccggatcccgcaatgcgggcggcgctgcagagccagccgtccggcattaactcctcggacgattggacccaggccatgcaacgtatcatggcgttgacgactcgcaaccccgaagcctttagacagcaaccccaggccaaccgtctatcggccatcatggaagctgtagtgccttcccgctctaatcccactcatgagaaggtcctggccatcgtgaacgcgttggtggagaacaaagctattcgtccagatgaggccggactggtatacaacgctctcttagaacgcgtggctcgctacaacagtagcaatgtgcaaaccaatttggaccgtatgataacagatgtacgcgaagccgtgtctcagcgcgaaaggttccagcgtgatgccaacctgggttcgctggtggcgttaaatgctttcttgagtactcagcctgctaatgtgccgcgtggtcaacaggattatactaactttttaagcgctttgagactgatggtatcagaagtacctcagagcgaagtgtatcagtccggtcctgattacttctttcagactagcagacagggcttgcagacggtaaatctgagccaagcttttaaaaaccttaaaggtttgtggggagtgcatgccccggtaggagaaagagcaaccgtgtctagcttgttaactccgaactcccgcctattattactgttggtagctcctttcaccgacagcggtagcatcgaccgtaattcctatttgggttacctactaaacctgtatcgcgaagccatagggcaaagtcaggtggacgagcagacctatcaagaaattacccaagtcagtcgcgctttgggacaggaagacactggcagtttggaagccactctgaacttcttgcttaccaatcggtctcaaaagatccctcctcaatatgctcttactgcggaggaggagaggatccttagatatgtgcagcagagcgtgggattgtttctgatgcaagagggggcaactccgactgcagcactggacatgacagcgcgaaatatggagcccagcatgtatgccagtaaccgacctttcattaacaaactgctggactacttgcacagagctgccgctatgaactctgattatttcaccaatgccatcttaaacccgcactggctgcccccacctggtttctacacgggcgaatatgacatgcccgaccctaatgacggatttctgtgggacgacgtggacagcgatgttttttcacctctttctgatcatcgcacgtggaaaaaggaaggcggcgatagaatgcattcttctgcatcgctgtccggggtcatgggtgctaccgcggctgagcccgagtctgcaagtccttttcctagtctacccttttctctacacagtgtacgtagcagcgaagtgggtagaataagtcgcccgagtttaatgggcgaagaggagtatctaaacgattccttgctcagaccggcaagagaaaaaaatttcccaaacaatggaatagaaagtttggtggataaaatgagtagatggaagacttatgctcaggatcacagagacgagcctgggatcatggggattacaagtagagcgagccgtagacgccagcgccatgacagacagaggggtcttgtgtgggacgatgaggattcggccgatgatagcagcgtgctggacttgggtgggagaggaaggggcaacccgtttgctcatttgcgccctcgcttgggtggtatgttgtaaaaaaaaataaaaaaaaaactcaccaaggccatggcgacgagcgtacgttcgttcttctttattatctgtgtctagtataatgaggcgagtcgtgctaggcggagcggtggtgtatccggagggtcctcctccttcgtacgagagcgtgatgcagcagcagcaggcgacggcggtgatgcaatccccactggaggctccctttgtgcctccgcgatacctggcacctacggagggcagaaacagcattcgttattcggaactggcacctcagtacgataccaccaggttgtatctggtggacaacaagtcggcggacattgcttctctgaactatcagaatgaccacagcaacttcttgaccacggtggtgcaaaacaatgactttacccctacggaagccagcacccagaccattaactttgatgaacgatcgcggtggggcggtcagctaaagaccatcatgcatactaacatgccaaacgtgaacgagtatatgtttagtaacaagttcaaagcgcgtgtgatggtgtccagaaaacctcccgacggtgctgcagttggggatacttatgatcacaagcaggatattttgaaatatgagtggttcgagtttactttgccagaaggcaacttttcagttactatgactattgatttgatgaacaatgccatcatagataattacttgaaagtgggtagacagaatggagtgcttgaaagtgacattggtgttaagttcgacaccaggaacttcaagctgggatgggatcccgaaaccaagttgatcatgcctggagtgtatacgtatgaagccttccatcctgacattgtcttactgcctggctgcggagtggattttaccgagagtcgtttgagcaaccttcttggtatcagaaaaaaacagccatttcaagagggttttaagattttgtatgaagatttagaaggtggtaatattccggccctcttggatgtagatgcctatgagaacagtaagaaagaacaaaaagccaaaatagaagctgctacagctgctgcagaagctaaggcaaacatagttgccagcgactctacaagggttgctaacgctggagaggtcagaggagacaattttgcgccaacacctgttccgactgcagaatcattattggccgatgtgtctgaaggaacggacgtgaaactcactattcaacctgtagaaaaagatagtaagaatagaagctataatgtgttggaagacaaaatcaacacagcctatcgcagttggtatctttcgtacaattatggcgatcccgaaaaaggagtgcgttcctggacattgctcaccacctcagatgtcacctgcggagcagagcaggtctactggtcgcttccagacatgatgaaggatcctgtcactttccgctccactagacaagtcagtaactaccctgtggtgggtgcagagcttatgcccgtcttctcaaagagcttctacaacgaacaagctgtgtactcccagcagctccgccagtccacctcgcttacgcacgtcttcaaccgctttcctgagaaccagattttaatccgtccgccggcgcccaccattaccaccgtcagtgaaaacgttcctgctctcacagatcacgggaccctgccgttgcgcagcagtatccggggagtccaacgtgtgaccgttactgacgccagacgccgcacctgtccctacgtgtacaaggcactgggcatagtcgcaccgcgcgtcctttcaagccgcactttctaaaaaaaaaaaaaatgtccattcttatctcgcccagtaataacaccggttggggtctgcgcgctccaagcaagatgtacggaggcgcacgcaaacgttctacccaacatcctgtccgtgttcgcggacattttcgcgctccatggggcgccctcaagggccgcactcgcgttcgaaccaccgtcgatgatgtaatcgatcaggtggttgccgacgcccgtaattatactcctactgcgcctacatctactgtggatgcagttattgacagtgtagtggctgacgctcgcaactatgctcgacgtaagagccggcgaaggcgcattgccagacgccaccgagctaccactgccatgcgagccgcaagagctctgctacgaagagctagacgcgtggggcgaagagccatgcttagggcggccagacgtgcagcttcgggcgccagcgccggcaggtcccgcaggcaagcagccgctgtcgcagcggcgactattgccgacatggcccaatcgcgaagaggcaatgtatactgggtgcgtgacgctgccaccggtcaacgtgtacccgtgcgcacccgtccccctcgcacttagaagatactgagcagtctccgatgttgtgtcccagcggcgaggatgtccaagcgcaaatacaaggaagaaatgctgcaggttatcgcacctgaagtctacggccaaccgttgaaggatgaaaaaaaaccccgcaaaatcaagcgggttaaaaaggacaaaaaagaagaggaagatggcgatgatgggctggcggagtttgtgcgcgagtttgccccacggcgacgcgtgcaatggcgtgggcgcaaagttcgacatgtgttgagacctggaacttcggtggtctttacacccggcgagcgttcaagcgctacttttaagcgttcctatgatgaggtgtacggggatgatgatattcttgagcaggcggctgaccgattaggcgagtttgcttatggcaagcgtagtagaataacttccaaggatgagacagtgtcgatacccttggatcatggaaatcccacccctagtcttaaaccggtcactttgcagcaagtgttacccgtaactccgcgaacaggtgttaaacgcgaaggtgaagatttgtatcccactatgcaactgatggtacccaaacgccagaagttggaggacgttttggagaaagtaaaagtggatccagatattcaacctgaggttaaagtgagacccattaagcaggtagcgcctggtctgggggtacaaactgtagacattaagattcccactgaaagtatggaagtgcaaactgaacccgcaaagcctactgccacctccactgaagtgcaaacggatccatggatgcccatgcctattacaactgacgccgccggtcccactcgaagatcccgacgaaagtacggtccagcaagtctgttgatgcccaattatgttgtacacccatctattattcctactcctggttaccgaggcactcgctactatcgcagccgaaacagtacctcccgccgtcgccgcaagacacctgcaaatcgcagtcgtcgccgtagacgcacaagcaaaccgactcccggcgccctggtgcggcaagtgtaccgcaatggtagtgcggaacctttgacactgccgcgtgcgcgttaccatccgagtatcatcacttaatcaatgttgccgctgcctccttgcagatatggccctcacttgtcgccttcgcgttcccatcactggttaccgaggaagaaactcgcgccgtagaagagggatgttgggacgcggaatgcgacgctacaggcgacggcgtgctatccgcaagcaattgcggggtggttttttaccagccttaattccaattatcgctgctgcaattggcgcgataccaggcatagcttccgtggcggttcaggcctcgcaacgacattgacattggaaaaaaacgtataaataaaaaaaaaaaaatacaatggactctgacactcctggtcctgtgactatgttttcttagagatggaagacatcaatttttcatccttggctccgcgacacggcacgaagccgtacatgggcacctggagcgacatcggcacgagccaactgaacgggggcgccttcaattggagcagtatctggagcgggcttaaaaattttggctcaaccataaaaacatacgggaacaaagcttggaacagcagtacaggacaggcgcttagaaataaacttaaagaccagaacttccaacaaaaagtagtcgatgggatagcttccggcatcaatggagtggtagatttggctaaccaggctgtgcagaaaaagataaacagtcgtttggacccgccgccagcaaccccaggtgaaatgcaagtggaggaagaaattcctccgccagaaaaacgaggcgacaagcgtccgcgtcccgatttggaagagacgctggtgacgcgcgtagatgaaccgccttcttatgaggaagcaacgaagcttggaatgcccaccactagaccgatagccccaatggccaccggggtgatgaaaccttctcagttgcatcgacccgtcaccttggatttgccccctccccctgctgctactgctgtacccgcttctaagcctgtcgctgccccgaaaccagtcgccgtagccaggtcacgtcccgggggcgctcctcgtccaaatgcgcactggcaaaatactctgaacagcatcgtgggtctaggcgtgcaaagtgtaaaacgccgtcgctgcttttaattaaatatggagtagcgcttaacttgcctatctgtgtatatgtgtcattacacgccgtcacagcagcagaggaaaaaaggaagaggtcgtgcgtcgacgctgagttactttcaagatggccaccccatcgatgctgccccaatgggcatacatgcacatcgccggacaggatgcttcggagtacctgagtccgggtctggtgcagttcgcccgcgccacagacacctacttcaatctgggaaataagtttagaaatcccaccgtagcgccgacccacgatgtgaccaccgaccgtagccagcggctcatgttgcgcttcgtgcccgttgaccgggaggacaatacatactcttacaaagtgcggtacaccctggccgtgggcgacaacagagtgctggatatggccagcacgttctttgacattaggggtgtgttggacagaggtcccagtttcaaaccctattctggtacggcttacaactccctggctcctaaaggcgctccaaatacatctcagtggattgcagaaggtgtaaaaaatacaactggtgaggaacacgtaacagaagaggaaaccaatactactacttacacttttggcaatgctcctgtaaaagctgaagctgaaattacaaaagaaggactcccagtaggtttggaagtttcagatgaagaaagtaaaccgatttatgctgataaaacatatcagccagaacctcagctgggagatgaaacttggactgaccttgatggaaaaaccgaaaagtatggaggcagggctctcaaacccgatactaagatgaaaccatgctacgggtcctttgccaaacctactaatgtgaaaggcggtcaggcaaaacaaaaaacaacggagcagccaaatcagaaagtcgaatatgatatcgacatggagttttttgatgcggcatcgcagaaaacaaacttaagtcctaaaattgtcatgtatgcagaaaatgtaaatttggaaactccagacactcatgtagtgtacaaacctggaacagaagacacaagttccgaagctaatttgggacaacaatctatgcccaacagacccaactacattggcttcagagataactttattggacttatgtactataacagtactggtaacatgggggtgctggctggtcaagcgtctcagttaaatgcagtggttgacttgcaggacagaaacacagaactttcttaccaactcttgcttgactctctgggcgacagaaccagatactttagcatgtggaatcaggctgtggacagttatgatcctgatgtacgtgttattgaaaatcatggtgtggaagatgaacttcccaactactgttttccactggacggcataggtgttccaacaaccagttacaaatcaatagttccaaatggagacaatgcgcctaattggaaggaacctgaagtaaatggaacaagtgagatcggacagggtaatttgtttgccatggaaattaaccttcaagccaatctatggcgaagtttcctttattccaatgtggctctatatctcccagactcgtacaaatacaccccgtccaatgtcactcttccagaaaacaaaaacacctacgactacatgaacgggcgggtggtgccgccatctctagtagacacctatgtgaacattggtgccaggtggtctctggatgccatggacaatgtcaacccattcaaccaccaccgtaacgctggcttgcgttaccgatccatgcttctgggtaacggacgttatgtgcctttccacatacaagtgcctcaaaaattcttcgctgttaaaaacctgctgcttctcccaggctcctacacttatgagtggaactttaggaaggatgtgaacatggttctacagagttccctcggtaacgacctgcgggtagatggcgccagcatcagtttcacgagcatcaacctctatgctacttttttccccatggctcacaacaccgcttccacccttgaagccatgctgcggaatgacaccaatgatcagtcattcaacgactacctatctgcagctaacatgctctaccccattcctgccaatgcaaccaatattcccatttccattccttctcgcaactgggcggctttcagaggctggtcatttaccagactgaaaaccaaagaaactccctctttggggtctggatttgacccctactttgtctattctggttctattccctacctggatggtaccttctacctgaaccacacttttaagaaggtttccatcatgtttgactcttcagtgagctggcctggaaatgacaggttactatctcctaacgaatttgaaataaagcgcactgtggatggcgaaggctacaacgtagcccaatgcaacatgaccaaagactggttcttggtacagatgctcgccaactacaacatcggctatcagggcttctacattccagaaggatacaaagatcgcatgtattcatttttcagaaacttccagcccatgagcaggcaggtggttgatgaggtcaattacaaagacttcaaggccgtcgccataccctaccaacacaacaactctggctttgtgggttacatggctccgaccatgcgccaaggtcaaccctatcccgctaactatccctatccactcattggaacaactgccgtaaatagtgttacgcagaaaaagttcttgtgtgacagaaccatgtggcgcataccgttctcgagcaacttcatgtctatgggggcccttacagacttgggacagaatatgctctatgccaactcagctcatgctctggacatgacctttgaggtggatcccatggatgagcccaccctgctttatcttctcttcgaagttttcgacgtggtcagagtgcatcagccacaccgcggcatcatcgaggcagtctacctgcgtacaccgttctcggccggtaacgctaccacgtaagaagcttcttgcttcttgcaaatagcagctgcaaccatggcctgcggatcccaaaacggctccagcgagcaagagctcagagccattgtccaagacctgggttgcggaccctattttttgggaacctacgataagcgcttcccggggttcatggcccccgataagctcgcctgtgccattgtaaatacggccggacgtgagacggggggagagcactggttggctttcggttggaacccacgttctaacacctgctacctttttgatccttttggattctcggatgatcgtctcaaacagatttaccagtttgaatatgagggtctcctgcgccgcagcgctcttgctaccaaggaccgctgtattacgctggaaaaatctacccagaccgtgcagggtccccgttctgccgcctgcggacttttctgctgcatgttccttcacgcctttgtgcactggcctgaccgtcccatggacggaaaccccaccatgaaattgctaactggagtgccaaacaacatgcttcattctcctaaagtccagcccaccctgtgtgacaatcaaaaagcactctaccattttcttaatacccattcgccttattttcgctcccatcgtacacacatcgaaagggccactgcgttcgaccgtatggatgttcaataatgactcatgtaaacaacgtgttcaataaacatcactttatttttttacatgtatcaaggctctgcattacttatttatttacaagtcgaatgggttctgacgagaatcagaatgacccgcaggcagtgatacgttgcggaactgatacttgggttgccacttgaattcgggaatcaccaacttgggaaccggtatatcgggcaggatgtcactccacagctttctggtcagctgcaaagctccaagcaggtcaggagccgaaatcttgaaatcacaattaggaccagtgctttgagcgcgagagttgcggtacaccggattgcagcactgaaacaccatcagcgacggatgtctcacgcttgccagcacggtgggatctgcaatcatgcccacatccagatcttcagcattggcaatgctgaacggggtcatcttgcaggtctgcctacccatggcgggcacccaattaggcttgtggttgcaatcgcagtgcagggggatcagtatcatcttggcctgatcctgtctgattcctggatacacggctctcatgaaagcatcatattgcttgaaagcctgctgggctttactaccctcggtataaaacatcccgcaggacctgctcgaaaactggttagctgcacagccggcatcattcacacagcagcgggcgtcattgttagctatttgcaccacacttctgccccagcggttttgggtgattttggttcgctcgggattctcctttaaggctcgttgtccgttctcgctggccacatccatctcgataatctgctccttctgaatcataatattgccatgcaggcacttcagcttgccctcataatcattgcagccatgaggccacaacgcacagcctgtacattcccaattatggtgggcgatctgagaaaaagaatgtatcattccctgcagaaatcttcccatcatcgtgctcagtgtcttgtgactagtgaaagttaactggatgcctcggtgctcctcgtttacgtactggtgacagatgcgcttgtattgttcgtgttgctcaggcattagtttaaaagaggttctaagttcgttatccagcctgtacttctccatcagcagacacatcacttccatgcctttctcccaagcagacaccaggggcaagctaatcggattcttaacagtgcaggcagcagctcctttagccagagggtcatctttagcgatcttctcaatgcttcttttgccatccttctcaacgatgcgcacgggcgggtagctgaaacccactgctacaagttgcgcctcttctctttcttcttcgctgtcttgactgatgtcttgcatggggatatgtttggtcttccttggcttctttttggggggtatcggaggaggaggactgtcgctccgttccggagacagggaggattgtgacgtttcgctcaccattaccaactgactgtcggtagaagaacctgaccccacacggcgacaggtgtttctcttcgggggcagaggtggaggcgattgcgaagggctgcggtccgacctggaaggcggatgactggcagaaccccttccgcgttcgggggtgtgctccctgtggcggtcgcttaactgatttccttcgcggctggccattgtgttctcctaggcagagaaacaacagacatggaaactcagccattgctgtcaacatcgccacgagtgccatcacatctcgtcctcagcgacgaggaaaaggagcagagcttaagcattccaccgcccagtcctgccaccacctctaccctagaagataaggaggtcgacgcatctcatgacatgcagaataaaaaagcgaaagagtctgagacagacatcgagcaagacccgggctatgtgacaccggtggaacacgaggaagagttgaaacgctttctagagagagaggatgaaaactgcccaaaacaacgagcagataactatcaccaagatgctggaaatagggatcagaacaccgactacctcatagggcttgacggggaagacgcgctccttaaacatctagcaagacagtcgctcatagtcaaggatgcattattggacagaactgaagtgcccatcagtgtggaagagctcagccgcgcctacgagcttaacctcttttcacctcgtactccccccaaacgtcagccaaacggcacctgcgagccaaatcctcgcttaaacttttatccagcttttgctgtgccagaagtactggctacctatcacatcttttttaaaaatcaaaaaattccagtctcctgccgcgctaatcgcacccgcgccgatgccctactcaatctgggacctggttcacgcttacctgatatagcttccttggaagaggttccaaagatcttcgagggtctgggcaataatgagactcgggccgcaaatgctctgcaaaagggagaaaatggcatggatgagcatcacagcgttctggtggaattggaaggcgataatgccagactcgcagtactcaagcgaagcatcgaggtcacacacttcgcatatcccgctgtcaacctgccccctaaagtcatgacggcggtcatggaccagttactcattaagcgcgcaagtcccctttcagaagacatgcatgacccagatgcctgtgatgagggtaaaccagtggtcagtgatgagcagctaacccgatggctgggcaccgactctcccagggatttggaagagcgtcgcaagcttatgatggccgtggtgctggttaccgtagaactagagtgtctccgacgtttctttaccgattcagaaaccttgcgcaaactcgaagagaatctgcactacacttttagacacggctttgtgcggcaggcatgcaagatatctaacgtggaactcaccaacctggtttcctacatgggtattctgcatgagaatcgcctaggacaaagcgtgctgcacagcaccctgaagggggaagcccgccgtgattacatccgcgattgtgtctatctgtacctgtgccacacgtggcaaaccggcatgggtgtatggcagcaatgtttagaagaacagaacttgaaagagcttgacaagctcttacagaaatctcttaaggttctgtggacagggttcgacgagcgcaccgtcgcttccgacctggcagacctcatcttcccagagcgtctcagggttactttgcgaaacggattgcctgactttatgagccagagcatgcttaacaattttcgctctttcatcctggaacgctccggtatcctgcccgccacctgctgcgcactgccctccgactttgtgcctctcacctaccgcgagtgccccccgccgctatggagtcactgctacctgttccgtctggccaactatctctcctaccactcggatgtgatcgaggatgtgagcggagacggcttgctggagtgtcactgccgctgcaatctgtgcacgccccaccggtccctagcttgcaacccccagttgatgagcgaaacccagataataggcacctttgaattgcaaggccccagcagccaaggcgatgggtcttctcctgggcaaagtttaaaactgaccccgggactgtggacctccgcctacttgcgcaagtttgctccggaagattaccacccctatgaaatcaagttctatgaggaccaatcacagcctccaaaggccgaactttcggcctgcgtcatcacccagggggcaattctggcccaattgcaagccatccaaaaatcccgccaagaatttctactgaaaaagggtaagggggtctaccttgacccccagaccggcgaggaactcaacacaaggttccctcaggatgtcccaacgacgagaaaacaagaagttgaaggtgcagccgccgcccccagaagatatggaggaagattgggacagtcaggcagaggaggcggaggaggacagtctggaggacagtctggaggaagacagtttggaggaggaaaacgaggaggcagaggaggtggaagaagtaaccgccgacaaacagttatcctcggctgcggagacaagcaacagcgctaccatctccgctccgagtcgaggaacccggcggcgtcccagcagtagatgggacgagaccggacgcttcccgaacccaaccagcgcttccaagaccggtaagaaggatcggcagggatacaagtcctggcgggggcataagaatgccatcatctcctgcttgcatgagtgcgggggcaacatatccttcacgcggcgctacttgctattccaccatggggtgaactttccgcgcaatgttttgcattactaccgtcacctccacagcccctactatagccagcaaatcccggcagtctcgacagataaagacagcggcggcgacctccaacagaaaaccagcagcggcagttagaaaatacacaacaagtgcagcaacaggaggattaaagattacagccaacgagccagcgcaaacccgagagttaagaaatcggatctttccaaccctgtatgccatcttccagcagagtcggggtcaagagcaggaactgaaaataaaaaaccgatctctgcgttcgctcaccagaagttgtttgtatcacaagagcgaagatcaacttcagcgcactctcgaggacgccgaggctctcttcaacaagtactgcgcgctgactcttaaagagtaggcagcgaccgcgcttattcaaaaaaggcgggaattacatcatcctcgacatgagtaaagaaattcccacgccttacatgtggagttatcaaccccaaatgggattggcggcaggcgcctcccaggactactccacccgcatgaattggctcagcgccgggccttctatgatttctcgagttaatgatatacgcgcctaccgaaaccaaatacttttggaacagtcagctcttaccaccacgccccgccaacaccttaatcccagaaattggcccgccgccctagtgtaccaggaaagtcccgctcccaccactgtattacttcctcgagacgcccaggccgaagtccaaatgactaatgcaggtgcgcagttagctggcggctccaccctatgtcgtcacaggcctcggcataatataaaacgcctgatgatcagaggccgaggtatccagctcaacgacgagtcggtgagctctccgcttggtctacgaccagacggaatctttcagattgccggctgcgggagatcttccttcacccctcgtcaggctgttctgactttggaaagttcgtcttcgcaaccccgctcgggcggaatcgggaccgttcaatttgtggaggagtttactccctctgtctacttcaaccccttctccggatctcctgggcattacccggacgagttcataccgaacttcgacgcgattagcgagtcagtggacggctacgattgatgtctggtgacgcggctgagctatctcggctgcgacatctagaccactgccgccgctttcgctgctttgcccgggaactcattgagttcatctacttcgaactccccaaggatcaccctcaaggtccggcccacggagtgcggatttctatcgaaggcaaaatagactctcgcctgcaacgaattttctcccagcggcccgtgctgatcgagcgagaccagggaaacaccacggtttccatctactgcatttgtaatcaccccggattgcatgaaagcctttgctgtcttatgtgtactgagtttaataaaaactgaattaagactctcctacggactgccgcttcttcaacccggattttacaaccagaagaacgaaacttttcctgtcgtccaggactctgttaacttcacctttcctactcacaaactagaagctcaacgactacaccgcttttccagaagcattttccctactaatactactttcaaaaccggaggtgagctccaaggtcttcctacagaaaacccttgggtggaagcgggccttgtagtgctaggaattcttgcgggtgggcttgtgattattctttgctacctatacacaccttgcttcactttcttagtggtgttgtggtattggtttaaaaaatggggcccatactagtcttgcttgttttactttcgcttttggaaccgggttctgccaattacgatccatgtctagacttcgacccagaaaactgcacacttacttttgcacccgacacaagccgcatctgtggagttcttattaagtgcggatgggaatgcaggtccgttgaaattacacacaataacaaaacctggaacaataccttatccaccacatgggagccaggagttcccgagtggtacactgtctctgtccgaggtcctgacggttccatccgcattagtaacaacactttcattttttctgaaatgtgcgatctggccatgttcatgagcaaacagtattctctatggcctcctagcaaggacaacatcgtaacgttctccattgcttattgcttgtgcgcttgccttcttactgctttactgtgcgtatgcatacacctgcttgtaaccactcgcatcaaaaacgccaataacaaagaaaaaatgccttaacctctttctgtttacagacatggcttctcttacatctctcatatttgtcagcattgtcactgccgctcatggacaaacagtcgtctctatccctctaggacataattacactctcataggacccccaatcacttcagaggtcatctggaccaaactgggaagcgttgattactttgatataatctgcaacaaaacaaaaccaataatagtaacttgcaacatacaaaatcttacattgattaatgttagcaaagtttacagcggttactattatggttatgacagatacagtagtcaatatagaaattacttggttcgtgttacccagttgaaaaccacgaaaatgccaaatatggcaaagattcgatccgatgacaattctctagaaacttttacatctcccaccacacccgacgaaaaaaacatcccagattcaatgattgcaattgttgcagcggtggcagtggtgatggcactaataataatatgcatgcttttatatgcttgtcgctacaaaaagtttcatcctaaaaaacaagatctcctactaaggcttaacatttaatttctttttatacagccatggtttccactaccacattccttatgcttactagtctcgcaactctgacttctgctcgctcacacctcactgtaactataggctcaaactgcacactaaaaggacctcaaggtggtcatgtcttttggtggagaatatatgacaatggatggtttacaaaaccatgtgaccaacctggtagatttttctgcaacggcagagacctaaccattatcaacgtgacagcaaatgacaaaggcttctattatggaaccgactataaaagtagtttagattataacattattgtactgccatctaccactccagcaccccgcacaactactttctctagcagcagtgtcgctaacaatacaatttccaatccaacctttgccgcgcttttaaaacgcactgtgaataattctacaacttcacatacaacaatttccacttcaacaatcagcattatcgctgcagtgacaattggaatatctattcttgtttttaccataacctactacgcctgctgctatagaaaagacaaacataaaggtgatccattacttagatttgatatttaatttgttctttttttttttatttacagtatggtgaacaccaatcatggtacctagaaatttcttcttcaccatactcatttgtgcatttaatgtttgcgctactttcacagcagtagccacagcaaccccagactgtataggagcatttgcttcctatgcactttttgcttttgttacttgcatctgcgtatgtagcatagtctgcctggttattaattttttccaacttatagactggatccttgtgcgaattgcctacctgcgccaccatcccgaataccgcaaccaaaatatcgcggcacttcttagactcatctaaaaccatgcaggctatactaccaatatttttgcttctattgcttccctacgctgtctcaaccccagctgcctatagtactccaccagaacaccttagaaaatgcaaattccaacaaccgtggtcatttcttgcttgctatcgagaaaaatcagaaattcccccaaatttaataatgattgctggaataattaatataatctgttgcaccataatttcatttttgatataccccctatttgattttggctggaatgctcccaatgcacatgatcatccacaagacccagaggaacacattcccctacaaaacatgcaacatccaatagcgctaatagattacgaaagtgaaccacaacccccactactccctgctattagttacttcaacctaaccggcggagatgactgaaacactcaccacctccaattccgccgaggatctgctcgatatggacggccgcgtctcagaacagcgactcgcccaactacgcatccgccagcagcaggaacgcgcggccaaagagctcagagatgtcatccaaattcaccaatgcaaaaaaggcatattctgtttggtaaaacaagccaagatatcctacgagatcaccgctactgaccatcgcctctcttacgaacttggcccccaacgacaaaaatttacctgcatggtgggaatcaaccccatagttatcacccagcaaagtggagatactaagggttgcattcactgctcctgcgattccatcgagtgcacctacaccctgctgaagaccctatacggcctaagagacctgctaccaatgaattaaaaaatgattaataaaaaatcacttacttgaaatcagcaataaggtctctgttgaaattttctcccagcagcacctcacttccctcttcccaactctggtattctaaaccccgttcagcggcatactttctccatactttaaaggggatgtcaaattttagctcctctcctgtacccacaatcttcatgtctttcttcccagatgaccaagagagtccggctcagtgactccttcaaccctgtctacccctatgaagatgaaagcacctcccaacacccctttataaacccagggtttatttccccaaatggcttcacacaaagcccaaacggagttcttactttaaaatgtttaaccccactaacaaccacaggcggatctctacagctaaaagtgggagggggacttacagtggatgacaccaacggttttttgaaagaaaacataagtgccaccacaccactcgttaagactggtcactctataggtttaccactaggagccggattgggaacgaatgaaaataaactttgtatcaaattaggacaaggacttacattcaattcaaacaacatttgcattgatgacaatattaacaccttatggacaggagtcaaccccaccgaagccaactgtcaaatcatgaactccagtgaatctaatgattgcaaattaattctaacactagttaaaactggagcactagtcactgcatttgtttatgttataggagtatctaacaattttaatatgctaactacacacagaaatataaattttactgcagagctgtttttcgattctactggtaatttactaactagactctcatccctcaaaactccacttaatcataaatcaggacaaaacatggctactggtgccattactaatgctaaaggtttcatgcccagcacgactgcctatcctttcaatgataattctagagaaaaagaaaactacatttacggaacttgttactacacagctagtgatcgcactgcttttcccattgacatatctgtcatgcttaaccgaagagcaataaatgacgagacatcatattgtattcgtataacttggtcctggaacacaggagatgccccagaggtgcaaacctctgctacaaccctagtcacctccccatttaccttttactacatcagagaagacgactgacaaataaagtttaacttgtttatttgaaaatcaattcacaaaatccgagtagttattttgcctcccccttcccatttaacagaatacaccaatctctccccacgcacagctttaaacatttggataccattagatatagacatggttttagattccacattccaaacagtttcagagcgagccaatctggggtcagtgatagataaaaatccatcgggatagtcttttaaagcgctttcacagtccaactgctgcggatgcgactccggagtctggatcacggtcatctggaagaagaacgatgggaatcataatccgaaaacggtatcggacgattgtgtctcatcaaacccacaagcagccgctgtctgcgtcgctccgtgcgactgctgtttatgggatcagggtccacagtgtcctgaagcatgattttaatagcccttaacatcaactttctggtgcgatgcgcgcagcaacgcattctgatttcactcaaatctttgcagtaggtacaacacattattacaatattgtttaataaaccataattaaaagcgctccagccaaaactcatatctgatataatcgcccctgcatgaccatcataccaaagtttaatataaattaaatgacgttccctcaaaaacacactacccacatacatgatctcttttggcatgtgcatattaacaatctgtctgtaccatggacaacgttggttaatcatgcaacccaatataaccttccggaaccacactgccaacaccgctcccccagccatgcattgaagtgaaccctgctgattacaatgacaatgaagaacccaattctctcgaccgtgaatcacttgagaatgaaaaatatctatagtggcacaacatagacataaatgcatgcatcttctcataatttttaactcctcaggatttagaaacatatcccagggaataggaagctcttgcagaacagtaaagctggcagaacaaggaagaccacgaacacaacttacactatgcatagtcatagtatcacaatctggcaacagcgggtggtcttcagtcatagaagctcgggtttcattttcctcacaacgtggtaactgggctctggtgtaagggtgatgtctggcgcatgatgtcgagcgtgcgcgcaaccttgtcataatggagttgcttcctgacattctcgtattttgtatagcaaaacgcggccctggcagaacacactcttcttcgccttctatcctgccgcttagcgtgttccgtgtgatagttcaagtacaaccacactcttaagttggtcaaaagaatgctggcttcagttgtaatcaaaactccatcgcatctaatcgttctgaggaaatcatccacggtagcatatgcaaatcccaaccaagcaatgcaactggattgtgtttcaagcaggagaggagagggaagagacggaagaaccatgttaatttttattccaaacgatctcgcagtacttcaaattgtagatcgcgcagatggcatctctcgcccccactgtgttggtgaaaaagcacagctagatcaaaagaaatgcgattttcaaggtgctcaacggtggcttccagcaaagcctccacgcgcacatccaagaacaaaagaataccaaaagaaggagcattttctaactcctcaatcatcatattacattcctgcaccattcccagataattttcagctttccagccttgaattattcgtgtcagttcttgtggtaaatccaatccacacattacaaacaggtcccggagggcgccctccaccaccattcttaaacacaccctcataatgacaaaatatcttgctcctgtgtcacctgtagcgaattgagaatggcaacatcaattgacatgcccttggctctaagttcttctttaagttctagttgtaaaaactctctcatattatcaccaaactgcttagccagaagccccccgggaacaagagcaggggacgctacagtgcagtacaagcgcagacctccccaattggctccagcaaaaacaagattggaataagcatattgggaaccgccagtaatatcatcgaagttgctggaaatataataaggcagagtttcttgtaaaaattgaataaaagaaaaatttgccaaaaaaacattcaaaacctctgggatgcaaatgcaataggttaccgcgctgcgctccaacattgttagttttgaattagtctgcaaaaataaaaaaaaaaacaagcgtcatatcatagtagcctgacgaacagatggataaatcagtctttccatcacaagacaagccacagggtctccagctcgaccctcgtaaaacctgtcatcatgattaaacaacagcaccgaaagttcctcgcggtgaccagcatgaataattcttgatgaagcatacaatccagacatgttagcatcagttaacgagaaaaaacagccaacatagcctttgggtataattatgcttaatcgtaagtatagcaaagccacccctcgcggatacaaagtaaaaggcacaggagaataaaaaatataattatttctctgctgctgttcaggcaacgtcgcccccggtccctctaaatacacatacaaagcctcatcagccatggcttaccagacaaagtacagcgggcacacaaagcacaagctctaaagtgactctccaacctctccacaatatatatatacacaagccctaaactgacgtaatgggagtaaagtgtaaaaaatcccgccaaacccaacacacaccccgaaactgcgtcaccagggaaaagtacagtttcacttccgcaatcccaacaggcgtaacttcctctttctcacggtacgtgatatcccactaacttgcaacgtcattttcccacggtcgcaccgccccttttagccgttaaccccacagccaatcaccacacgatccacactttttaaaatcacctcatttacatattggcaccattccatctataaggtatattattgatgatg
